United States Patent Application Publication US 2007/0042982 A1 - sequence listing, part 2

SEQ ID NO: 39281 - RNA, 20 nt, Homo sapiens
uaauguagauaaagcacugu

SEQ ID NO: 39282 - RNA, 22 nt, Homo sapiens
auuuuuguuuucauuaucucaa

SEQ ID NO: 39283 - RNA, 19 nt, Homo sapiens
uuaaaaaaaaauacugaug

SEQ ID NO: 39284 - RNA, 13 nt, Homo sapiens
gcuauaggugcua

SEQ ID NO: 39285 - RNA, 17 nt, Homo sapiens
acacucaaaucaagaaa

SEQ ID NO: 39286 - RNA, 17 nt, Homo sapiens
ggcaggaccuguggcca

SEQ ID NO: 39287 - RNA, 14 nt, Homo sapiens
uauuuguaucacaa

SEQ ID NO: 39288 - RNA, 16 nt, Homo sapiens
uuaucucaaaacugca

SEQ ID NO: 39289 - RNA, 20 nt, Homo sapiens
caaguucuuaguugcuguau

SEQ ID NO: 39290 - RNA, 21 nt, Homo sapiens
uuuaaagcuuauuaaaacuca

SEQ ID NO: 39291 - RNA, 19 nt, Homo sapiens
aaaaucacaaacucaucca

SEQ ID NO: 39292 - RNA, 15 nt, Homo sapiens
guaagggaaacugcc

SEQ ID NO: 39293 - RNA, 13 nt, Homo sapiens
cugagcaggauuu

SEQ ID NO: 39294 - RNA, 14 nt, Homo sapiens
aagggauggcaaga

SEQ ID NO: 39295 - RNA, 14 nt, Homo sapiens
uccuagugaaagag

SEQ ID NO: 39296 - RNA, 14 nt, Homo sapiens
agaagagcuguuca

SEQ ID NO: 39297 - RNA, 15 nt, Homo sapiens
uaaaaccacagcagu

SEQ ID NO: 39298 - RNA, 12 nt, Homo sapiens
auuagaugacug

SEQ ID NO: 39299 - RNA, 16 nt, Homo sapiens
aaaagggaacugaaca

SEQ ID NO: 39300 - RNA, 17 nt, Homo sapiens
cuguaugucucguggua

SEQ ID NO: 39301 - RNA, 21 nt, Homo sapiens
uucauuaucucaaaacugcac

SEQ ID NO: 39302 - RNA, 13 nt, Homo sapiens
uuuugcuguagaa

SEQ ID NO: 39303 - RNA, 18 nt, Homo sapiens
aaauuauauuuugaacaa

SEQ ID NO: 39304 - RNA, 16 nt, Homo sapiens
aacaacucgaaucacu

SEQ ID NO: 39305 - RNA, 18 nt, Homo sapiens
cucaaaacugcacuguca

SEQ ID NO: 39306 - RNA, 21 nt, Homo sapiens
uagaaaaauuagaugacugaa

SEQ ID NO: 39307 - RNA, 15 nt, Homo sapiens
aggaauuguuuuuau

SEQ ID NO: 39308 - RNA, 14 nt, Homo sapiens
uguacagucuugua

SEQ ID NO: 39309 - RNA, 13 nt, Homo sapiens
uguguuucuuuag

SEQ ID NO: 39310 - RNA, 18 nt, Homo sapiens
cauauugaugugugucua

SEQ ID NO: 39311 - RNA, 14 nt, Homo sapiens
auaugcaaagcacu

SEQ ID NO: 39312 - RNA, 22 nt, Homo sapiens
uguacaguuuuuauugcuuguu

SEQ ID NO: 39313 - RNA, 13 nt, Homo sapiens
cuuaguugcugua

SEQ ID NO: 39314 - RNA, 13 nt, Homo sapiens
ucuucacaacaga

SEQ ID NO: 39315 - RNA, 16 nt, Homo sapiens
aaguuuaauugacuua

SEQ ID NO: 39316 - RNA, 14 nt, Homo sapiens
cacaaaucuuaacu

SEQ ID NO: 39317 - RNA, 14 nt, Homo sapiens
agagaccacaagca

SEQ ID NO: 39318 - RNA, 19 nt, Homo sapiens
uacauuauuggacuuccau

SEQ ID NO: 39319 - RNA, 15 nt, Homo sapiens
auuauucccauucua

SEQ ID NO: 39320 - RNA, 17 nt, Homo sapiens
guacauguuaaacuuac

SEQ ID NO: 39321 - RNA, 18 nt, Homo sapiens
caagaugugggcagugau

SEQ ID NO: 39322 - RNA, 14 nt, Homo sapiens
ucaaauaugcaaag

SEQ ID NO: 39323 - RNA, 19 nt, Homo sapiens
aaguaugcacuaaucaaua

SEQ ID NO: 39324 - RNA, 18 nt, Homo sapiens
gccagacuggcacaguuu

SEQ ID NO: 39325 - RNA, 14 nt, Homo sapiens
agaugaugaugauc

SEQ ID NO: 39326 - RNA, 16 nt, Homo sapiens
aacuuacuuaguguua

SEQ ID NO: 39327 - RNA, 22 nt, Homo sapiens
gagaagagcuguucacagccag

SEQ ID NO: 39328 - RNA, 20 nt, Homo sapiens
cuaaucaauacuuugaacac

SEQ ID NO: 39329 - RNA, 13 nt, Homo sapiens
aguugcuguaugu

SEQ ID NO: 39330 - RNA, 19 nt, Homo sapiens
aauuucauaccuaucaucu

SEQ ID NO: 39331 - RNA, 15 nt, Homo sapiens
ccccucggagaagag

SEQ ID NO: 39332 - RNA, 16 nt, Homo sapiens
auaaaauucauuccau

SEQ ID NO: 39333 - RNA, 23 nt, Homo sapiens
gagcaguagcagcagcaucucug

SEQ ID NO: 39334 - RNA, 15 nt, Homo sapiens
aaaaucauuucugca

SEQ ID NO: 39335 - RNA, 15 nt, Homo sapiens
gcaccuacaguguac

SEQ ID NO: 39336 - RNA, 19 nt, Homo sapiens
gguuaccuuuguucccaaa

SEQ ID NO: 39337 - RNA, 22 nt, Homo sapiens
aagaugugggcagugaugucac

SEQ ID NO: 39338 - RNA, 19 nt, Homo sapiens
agacgugauuuugcuguag

SEQ ID NO: 39339 - RNA, 23 nt, Homo sapiens
gaaaugcugguuuuucaguuuuc

SEQ ID NO: 39340 - RNA, 19 nt, Homo sapiens
aagcaccuuuagaauauua

SEQ ID NO: 39341 - RNA, 16 nt, Homo sapiens
gcaaauuccaauacau

SEQ ID NO: 39342 - RNA, 20 nt, Homo sapiens
aagauggcacuuauaaccaa

SEQ ID NO: 39343 - RNA, 16 nt, Homo sapiens
accaauauuguacagu

SEQ ID NO: 39344 - RNA, 20 nt, Homo sapiens
ucaggaaaucaaauaugcaa

SEQ ID NO: 39345 - RNA, 17 nt, Homo sapiens
uggaaucauaugggaua

SEQ ID NO: 39346 - RNA, 14 nt, Homo sapiens
uugugaagaaacau

SEQ ID NO: 39347 - RNA, 17 nt, Homo sapiens
uacaaaaacacagcaag

SEQ ID NO: 39348 - RNA, 19 nt, Homo sapiens
guagaaaagggaacugaac

SEQ ID NO: 39349 - RNA, 14 nt, Homo sapiens
aacagucucaggaa

SEQ ID NO: 39350 - RNA, 20 nt, Homo sapiens
uugaaggaguccuugcauca

SEQ ID NO: 39351 - RNA, 13 nt, Homo sapiens
uaaguaaaaccac

SEQ ID NO: 39352 - RNA, 19 nt, Homo sapiens
augcacuaaucaauacuuu

SEQ ID NO: 39353 - RNA, 16 nt, Homo sapiens
auaaaauacauacuau

SEQ ID NO: 39354 - RNA, 23 nt, Homo sapiens
auuaaaacucauuuuuguuuuca

SEQ ID NO: 39355 - RNA, 21 nt, Homo sapiens
aggugcuacaaaaacacagca

SEQ ID NO: 39356 - RNA, 17 nt, Homo sapiens
gacgugauuuugcugua

SEQ ID NO: 39357 - RNA, 13 nt, Homo sapiens
caguguacagucu

SEQ ID NO: 39358 - RNA, 11 nt, Homo sapiens
aagacugacca

SEQ ID NO: 39359 - RNA, 19 nt, Homo sapiens
agggaacugaacauuccag

SEQ ID NO: 39360 - RNA, 19 nt, Homo sapiens
uuucauaccuaucaucuua

SEQ ID NO: 39361 - RNA, 15 nt, Homo sapiens
uucaguuuucaggag

SEQ ID NO: 39362 - RNA, 16 nt, Homo sapiens
aucacaaacucaucca

SEQ ID NO: 39363 - RNA, 20 nt, Homo sapiens
aauacauuauuggacuucca

SEQ ID NO: 39364 - RNA, 10 nt, Homo sapiens
ucauauugau

SEQ ID NO: 39365 - RNA, 12 nt, Homo sapiens
uauuuugaacaa

SEQ ID NO: 39366 - RNA, 16 nt, Homo sapiens
gauuuugcuguagaag

SEQ ID NO: 39367 - RNA, 17 nt, Homo sapiens
gguuaccuuuguuccca

SEQ ID NO: 39368 - RNA, 16 nt, Homo sapiens
caacagauuauuaccu

SEQ ID NO: 39369 - RNA, 20 nt, Homo sapiens
uuaaagcuuauuaaaacuca

SEQ ID NO: 39370 - RNA, 22 nt, Homo sapiens
guuuaugcauagauaaucucuc

SEQ ID NO: 39371 - RNA, 21 nt, Homo sapiens
gcaucaauuuuucuuauuuca

SEQ ID NO: 39372 - RNA, 16 nt, Homo sapiens
acuaauaaaauacaua

SEQ ID NO: 39373 - RNA, 20 nt, Homo sapiens
guucucuucuuuaaagggau

SEQ ID NO: 39374 - RNA, 14 nt, Homo sapiens
uucauuccauuugc

SEQ ID NO: 39375 - RNA, 12 nt, Homo sapiens
auacacacucaa

SEQ ID NO: 39376 - RNA, 15 nt, Homo sapiens
gugaacacaucagcu

SEQ ID NO: 39377 - RNA, 14 nt, Homo sapiens
acuuauuuauauaa

SEQ ID NO: 39378 - RNA, 20 nt, Homo sapiens
aggugcuacaaaaacacagc

SEQ ID NO: 39379 - RNA, 20 nt, Homo sapiens
ucuuauuucauuucuuugag

SEQ ID NO: 39380 - RNA, 20 nt, Homo sapiens
aauuauauuuugaacaacuc

SEQ ID NO: 39381 - RNA, 13 nt, Homo sapiens
accuacaguguac

SEQ ID NO: 39382 - RNA, 16 nt, Homo sapiens
acaacucgaaucacuc

SEQ ID NO: 39383 - RNA, 11 nt, Homo sapiens
ugaacauucca

SEQ ID NO: 39384 - RNA, 17 nt, Homo sapiens
agacuauucaaacaguc

SEQ ID NO: 39385 - RNA, 20 nt, Homo sapiens
uguuaauaaaaguacauguu

SEQ ID NO: 39386 - RNA, 13 nt, Homo sapiens
ucuuaagacguga

SEQ ID NO: 39387 - RNA, 20 nt, Homo sapiens
cuuuaaagggauggcaagau

SEQ ID NO: 39388 - RNA, 19 nt, Homo sapiens
agaugugggcagugauguc

SEQ ID NO: 39389 - RNA, 13 nt, Homo sapiens
ucuuaacuugaag

SEQ ID NO: 39390 - RNA, 20 nt, Homo sapiens
acagucucaggaaaucaaau

SEQ ID NO: 39391 - RNA, 19 nt, Homo sapiens
uucaaacagucucaggaaa

SEQ ID NO: 39392 - RNA, 14 nt, Homo sapiens
aaaauaccaugcca

SEQ ID NO: 39393 - RNA, 13 nt, Homo sapiens
auucccauucuac

SEQ ID NO: 39394 - RNA, 17 nt, Homo sapiens
uucccauucuacauacu

SEQ ID NO: 39395 - RNA, 20 nt, Homo sapiens
guuuaugcauagauaaucuc

SEQ ID NO: 39396 - RNA, 23 nt, Homo sapiens
cucauuuuuguuuucauuaucuc

SEQ ID NO: 39397 - RNA, 17 nt, Homo sapiens
acccucaagacaaauga

SEQ ID NO: 39398 - RNA, 16 nt, Homo sapiens
ugaaaagacuccaaag

SEQ ID NO: 39399 - RNA, 16 nt, Homo sapiens
uaauaaaaguacaugu

SEQ ID NO: 39400 - RNA, 15 nt, Homo sapiens
aaagaggcagcuuga

SEQ ID NO: 39401 - RNA, 18 nt, Homo sapiens
auuauuggacuuccauuu

SEQ ID NO: 39402 - RNA, 18 nt, Homo sapiens
agaauacuaauaaaauac

SEQ ID NO: 39403 - RNA, 18 nt, Homo sapiens
cucaacauaacauaagcu

SEQ ID NO: 39404 - RNA, 13 nt, Homo sapiens
agacuccaaagaa

SEQ ID NO: 39405 - RNA, 22 nt, Homo sapiens
acuucugucuucacaacagauu

SEQ ID NO: 39406 - RNA, 16 nt, Homo sapiens
uacagucuuguauuaa

SEQ ID NO: 39407 - RNA, 14 nt, Homo sapiens
aaaucauuucugca

SEQ ID NO: 39408 - RNA, 19 nt, Homo sapiens
augaugaucuuuaaaauac

SEQ ID NO: 39409 - RNA, 22 nt, Homo sapiens
ugauuucagcaccuacagugua

SEQ ID NO: 39410 - RNA, 22 nt, Homo sapiens
cauuaucucaaaacugcacugu

SEQ ID NO: 39411 - RNA, 15 nt, Homo sapiens
guauuaaguuguuaa

SEQ ID NO: 39412 - RNA, 22 nt, Homo sapiens
ucaggaaaucaaauaugcaaag

SEQ ID NO: 39413 - RNA, 16 nt, Homo sapiens
caaacagucucaggaa

SEQ ID NO: 39414 - RNA, 21 nt, Homo sapiens
gacaaaugacccccaucccau

SEQ ID NO: 39415 - RNA, 13 nt, Homo sapiens
accaauauuguac

SEQ ID NO: 39416 - RNA, 13 nt, Homo sapiens
auggaacauaaaa

SEQ ID NO: 39417 - RNA, 17 nt, Homo sapiens
acuaaucaauacuuuga

SEQ ID NO: 39418 - RNA, 16 nt, Homo sapiens
agucuuguauuaaguu

SEQ ID NO: 39419 - RNA, 19 nt, Homo sapiens
acuucuaaguaaaaccaca

SEQ ID NO: 39420 - RNA, 14 nt, Homo sapiens
aaaagacugaccaa

SEQ ID NO: 39421 - RNA, 14 nt, Homo sapiens
ugcuguaugucucg

SEQ ID NO: 39422 - RNA, 14 nt, Homo sapiens
ugggaaagcauugu

SEQ ID NO: 39423 - RNA, 22 nt, Homo sapiens
ucaaaauaccaugccauuuaaa

SEQ ID NO: 39424 - RNA, 17 nt, Homo sapiens
cauuauuggacuuccau

SEQ ID NO: 39425 - RNA, 20 nt, Homo sapiens
cggagaagagcuguucacag

SEQ ID NO: 39426 - RNA, 14 nt, Homo sapiens
gugaacacaucagc

SEQ ID NO: 39427 - RNA, 19 nt, Homo sapiens
ugaaggaguccuugcauca

SEQ ID NO: 39428 - RNA, 14 nt, Homo sapiens
augcaaagcacuga

SEQ ID NO: 39429 - RNA, 17 nt, Homo sapiens
gacuucugucuucacaa

SEQ ID NO: 39430 - RNA, 21 nt, Homo sapiens
acauacuauagauucuuuauu

SEQ ID NO: 39431 - RNA, 20 nt, Homo sapiens
uaaaaucacaaacucaucca

SEQ ID NO: 39432 - RNA, 18 nt, Homo sapiens
caaguccaagcauaccaa

SEQ ID NO: 39433 - RNA, 23 nt, Homo sapiens
acuuaagguuaccuuuguuccca

SEQ ID NO: 39434 - RNA, 19 nt, Homo sapiens
ccaaagcccaaagugguau

SEQ ID NO: 39435 - RNA, 14 nt, Homo sapiens
acugaacauuccag

SEQ ID NO: 39436 - RNA, 14 nt, Homo sapiens
cucgaaucacucau

SEQ ID NO: 39437 - RNA, 21 nt, Homo sapiens
ucccaaauuucauaccuauca

SEQ ID NO: 39438 - RNA, 23 nt, Homo sapiens
gcaucagcugcugaaacaacaaa

SEQ ID NO: 39439 - RNA, 16 nt, Homo sapiens
aaaaucacaaacucau

SEQ ID NO: 39440 - RNA, 23 nt, Homo sapiens
ccacagcaguugaaaagacucca

SEQ ID NO: 39441 - RNA, 17 nt, Homo sapiens
auaauaaaauucauucc

SEQ ID NO: 39442 - RNA, 13 nt, Homo sapiens
aaaagacugacca

SEQ ID NO: 39443 - RNA, 18 nt, Homo sapiens
uacauuauuggacuucca

SEQ ID NO: 39444 - RNA, 23 nt, Homo sapiens
auuaucucaaaacugcacuguca

SEQ ID NO: 39445 - RNA, 19 nt, Homo sapiens
ccaaagaaauguaagggaa

SEQ ID NO: 39446 - RNA, 15 nt, Homo sapiens
ucuacauacuaugga

SEQ ID NO: 39447 - RNA, 21 nt, Homo sapiens
ccaaguucuuaguugcuguau

SEQ ID NO: 39448 - RNA, 21 nt, Homo sapiens
gacucauuuuaaaaaauggaa

SEQ ID NO: 39449 - RNA, 15 nt, Homo sapiens
aaaagacuccaaaga

SEQ ID NO: 39450 - RNA, 20 nt, Homo sapiens
cccaaauuucauaccuauca

SEQ ID NO: 39451 - RNA, 20 nt, Homo sapiens
agaauauuaaaaauuaauuc

SEQ ID NO: 39452 - RNA, 23 nt, Homo sapiens
uucaaaaauuauauuuugaacaa

SEQ ID NO: 39453 - RNA, 19 nt, Homo sapiens
cucgugguaggacuguaga

SEQ ID NO: 39454 - RNA, 17 nt, Homo sapiens
ucuauggcauauugaua

SEQ ID NO: 39455 - RNA, 18 nt, Homo sapiens
agcauuguaaaugugcuu

SEQ ID NO: 39456 - RNA, 15 nt, Homo sapiens
aauucauuccauuug

SEQ ID NO: 39457 - RNA, 17 nt, Homo sapiens
uugaaaagacuccaaag

SEQ ID NO: 39458 - RNA, 18 nt, Homo sapiens
aucauuucugcaucagcu

SEQ ID NO: 39459 - RNA, 11 nt, Homo sapiens
uuugaacacaa

SEQ ID NO: 39460 - RNA, 21 nt, Homo sapiens
guuguuaauaaaaguacaugu

SEQ ID NO: 39461 - RNA, 16 nt, Homo sapiens
auuggacuuccauuug

SEQ ID NO: 39462 - RNA, 15 nt, Homo sapiens
ugugaacacaucagc

SEQ ID NO: 39463 - RNA, 18 nt, Homo sapiens
uuguuuucauuaucucaa

SEQ ID NO: 39464 - RNA, 17 nt, Homo sapiens
uaaaauacacacucaaa

SEQ ID NO: 39465 - RNA, 15 nt, Homo sapiens
aaagcacugacuucu

SEQ ID NO: 39466 - RNA, 16 nt, Homo sapiens
aaaugcugguuuuuca

SEQ ID NO: 39467 - RNA, 21 nt, Homo sapiens
aaugcugguuuuucaguuuuc

SEQ ID NO: 39468 - RNA, 16 nt, Homo sapiens
agcuuauuaaaacuca

SEQ ID NO: 39469 - RNA, 15 nt, Homo sapiens
ugaacacaucagcuu

SEQ ID NO: 39470 - RNA, 20 nt, Homo sapiens
aauuucauaccuaucaucuu

SEQ ID NO: 39471 - RNA, 18 nt, Homo sapiens
cuuuuaaaaaaaaauacu

SEQ ID NO: 39472 - RNA, 20 nt, Homo sapiens
gacgugauuuugcuguagaa

SEQ ID NO: 39473 - RNA, 20 nt, Homo sapiens
ucacaaacucauccauuaau

SEQ ID NO: 39474 - RNA, 17 nt, Homo sapiens
gaaaagggaacugaaca

SEQ ID NO: 39475 - RNA, 12 nt, Homo sapiens
ccacagcaguug

SEQ ID NO: 39476 - RNA, 15 nt, Homo sapiens
uguagauaaagcacu

SEQ ID NO: 39477 - RNA, 20 nt, Homo sapiens
agagaagauagcagggcaug

SEQ ID NO: 39478 - RNA, 22 nt, Homo sapiens
guuucauauugaugugugucua

SEQ ID NO: 39479 - RNA, 19 nt, Homo sapiens
gcaguugaaaagacuccaa

SEQ ID NO: 39480 - RNA, 21 nt, Homo sapiens
agcaaauuccaauacauuauu

SEQ ID NO: 39481 - RNA, 22 nt, Homo sapiens
auauuuguaucacaaaucuuaa

SEQ ID NO: 39482 - RNA, 20 nt, Homo sapiens
ccagguagagagaccacaag

SEQ ID NO: 39483 - RNA, 17 nt, Homo sapiens
caggauaagagggauua

SEQ ID NO: 39484 - RNA, 20 nt, Homo sapiens
uaaacuuacuuaguguuaug

SEQ ID NO: 39485 - RNA, 17 nt, Homo sapiens
ugcuacaaaaacacagc

SEQ ID NO: 39486 - RNA, 21 nt, Homo sapiens
caaguucuuaguugcuguaug

SEQ ID NO: 39487 - RNA, 16 nt, Homo sapiens
uguacagucuuguauu

SEQ ID NO: 39488 - RNA, 12 nt, Homo sapiens
uaugcacuaauc

SEQ ID NO: 39489 - RNA, 19 nt, Homo sapiens
gacgugauuuugcuguaga

SEQ ID NO: 39490 - RNA, 20 nt, Homo sapiens
auggaauuucucccagucau

SEQ ID NO: 39491 - RNA, 21 nt, Homo sapiens
gaccaauauuguacaguuuuu

SEQ ID NO: 39492 - RNA, 19 nt, Homo sapiens
caggugccaguuauggcua

SEQ ID NO: 39493 - RNA, 23 nt, Homo sapiens
gacuccaaagaaauguaagggaa

SEQ ID NO: 39494 - RNA, 17 nt, Homo sapiens
uagugaaucacguaaag

SEQ ID NO: 39495 - RNA, 23 nt, Homo sapiens
ucacaacagauuauuaccuuaca

SEQ ID NO: 39496 - RNA, 16 nt, Homo sapiens
agcaggcuacugucag

SEQ ID NO: 39497 - RNA, 13 nt, Homo sapiens
uccccucggagaa

SEQ ID NO: 39498 - RNA, 19 nt, Homo sapiens
cacucauuuauuuccauau

SEQ ID NO: 39499 - RNA, 14 nt, Homo sapiens
aaaauucauuccau

SEQ ID NO: 39500 - RNA, 18 nt, Homo sapiens
aacaacucgaaucacuca

SEQ ID NO: 39501 - RNA, 15 nt, Homo sapiens
cucaagacaaaugac

SEQ ID NO: 39502 - RNA, 15 nt, Homo sapiens
agcaaauuccaauac

SEQ ID NO: 39503 - RNA, 14 nt, Homo sapiens
auaccuaucaucuu

SEQ ID NO: 39504 - RNA, 21 nt, Homo sapiens
uccaaagaaauguaagggaaa

SEQ ID NO: 39505 - RNA, 19 nt, Homo sapiens
cgugguaggacuguagaaa

SEQ ID NO: 39506 - RNA, 20 nt, Homo sapiens
auacauuauuggacuuccau

SEQ ID NO: 39507 - RNA, 19 nt, Homo sapiens
aucacucauuuauuuccau

SEQ ID NO: 39508 - RNA, 13 nt, Homo sapiens
caagacaaaugac

SEQ ID NO: 39509 - RNA, 23 nt, Homo sapiens
ccaauacauuauuggacuuccau

SEQ ID NO: 39510 - RNA, 12 nt, Homo sapiens
uaauucuuuauc

SEQ ID NO: 39511 - RNA, 23 nt, Homo sapiens
guuguucucuucuuuaaagggau

SEQ ID NO: 39512 - RNA, 19 nt, Homo sapiens
agaugugaacacaucagcu

SEQ ID NO: 39513 - RNA, 20 nt, Homo sapiens
caaucacaaaaguauauuca

SEQ ID NO: 39514 - RNA, 19 nt, Homo sapiens
ucacaaaaguauauucaaa

SEQ ID NO: 39515 - RNA, 18 nt, Homo sapiens
gggacuucugucuucaca

SEQ ID NO: 39516 - RNA, 20 nt, Homo sapiens
accaauauuguacaguuuuu

SEQ ID NO: 39517 - RNA, 23 nt, Homo sapiens
aaacauuuaucuuuguacguucu

SEQ ID NO: 39518 - RNA, 18 nt, Homo sapiens
uaauaaaauucauuccau

SEQ ID NO: 39519 - RNA, 23 nt, Homo sapiens
gaauacuaauaaaauacauacua

SEQ ID NO: 39520 - RNA, 20 nt, Homo sapiens
caagcauaccaacacgagca

SEQ ID NO: 39521 - RNA, 17 nt, Homo sapiens
auguagauaaagcacug

SEQ ID NO: 39522 - RNA, 22 nt, Homo sapiens
cuagugaaagaggcagcuugaa

SEQ ID NO: 39523 - RNA, 16 nt, Homo sapiens
acuuacuuaguguuau

SEQ ID NO: 39524 - RNA, 14 nt, Homo sapiens
cuucacaacagauu

SEQ ID NO: 39525 - RNA, 20 nt, Homo sapiens
aaucaaauaugcaaagcacu

SEQ ID NO: 39526 - RNA, 20 nt, Homo sapiens
uuuuuauggaggcuuugcau

SEQ ID NO: 39527 - RNA, 21 nt, Homo sapiens
cagcaguugaaaagacuccaa

SEQ ID NO: 39528 - RNA, 12 nt, Homo sapiens
uaguugcuguau

SEQ ID NO: 39529 - RNA, 21 nt, Homo sapiens
uguuuaaaaucauuucugcau

SEQ ID NO: 39530 - RNA, 18 nt, Homo sapiens
aguaaaaccacagcaguu

SEQ ID NO: 39531 - RNA, 15 nt, Homo sapiens
cucccagucauuuaa

SEQ ID NO: 39532 - RNA, 19 nt, Homo sapiens
aguaugcacuaaucaauac

SEQ ID NO: 39533 - RNA, 22 nt, Homo sapiens
acuccaaagaaauguaagggaa

SEQ ID NO: 39534 - RNA, 15 nt, Homo sapiens
ugcugaaacaacaaa

SEQ ID NO: 39535 - RNA, 21 nt, Homo sapiens
guucucuucuuuaaagggaug

SEQ ID NO: 39536 - RNA, 21 nt, Homo sapiens
uuaaaaucacaaacucaucca

SEQ ID NO: 39537 - RNA, 16 nt, Homo sapiens
agucucaggaaaucaa

SEQ ID NO: 39538 - RNA, 22 nt, Homo sapiens
acacagcaagggugaugggaaa

SEQ ID NO: 39539 - RNA, 10 nt, Homo sapiens
aaagggaugg

SEQ ID NO: 39540 - RNA, 20 nt, Homo sapiens
gaaucacucauuuauuucca

SEQ ID NO: 39541 - RNA, 15 nt, Homo sapiens
uaccuaucaucuuaa

SEQ ID NO: 39542 - RNA, 13 nt, Homo sapiens
acaaacucaucca

SEQ ID NO: 39543 - RNA, 19 nt, Homo sapiens
acugagaugugaacacauc

SEQ ID NO: 39544 - RNA, 16 nt, Homo sapiens
acaguuuucugagaaa

SEQ ID NO: 39545 - RNA, 17 nt, Homo sapiens
aaugacccccaucccau

SEQ ID NO: 39546 - RNA, 15 nt, Homo sapiens
aaguaaaaccacagc

SEQ ID NO: 39547 - RNA, 19 nt, Homo sapiens
accuguggccaaguucuua

SEQ ID NO: 39548 - RNA, 15 nt, Homo sapiens
gauauaaaagacuga

SEQ ID NO: 39549 - RNA, 22 nt, Homo sapiens
cucaaaauaccaugccauuuaa

SEQ ID NO: 39550 - RNA, 21 nt, Homo sapiens
uauaggugcuacaaaaacaca

SEQ ID NO: 39551 - RNA, 14 nt, Homo sapiens
acauaacauaagcu

SEQ ID NO: 39552 - RNA, 22 nt, Homo sapiens
uuucugagaaagacuauucaaa

SEQ ID NO: 39553 - RNA, 16 nt, Homo sapiens
ucuaaguaaaaccaca

SEQ ID NO: 39554 - RNA, 19 nt, Homo sapiens
ucugagaaagacuauucaa

SEQ ID NO: 39555 - RNA, 15 nt, Homo sapiens
auauuaaaaucacaa

SEQ ID NO: 39556 - RNA, 18 nt, Homo sapiens
cauuuuaaaaaauggaac

SEQ ID NO: 39557 - RNA, 17 nt, Homo sapiens
caggcuacugucagcuc

SEQ ID NO: 39558 - RNA, 14 nt, Homo sapiens
aucauaugggauac

SEQ ID NO: 39559 - RNA, 14 nt, Homo sapiens
auucauuccauuug

SEQ ID NO: 39560 - RNA, 15 nt, Homo sapiens
uuuuccuguucuuaa

SEQ ID NO: 39561 - RNA, 20 nt, Homo sapiens
ugaacaacucgaaucacuca

SEQ ID NO: 39562 - RNA, 17 nt, Homo sapiens
ugaaaauauuuguauca

SEQ ID NO: 39563 - RNA, 15 nt, Homo sapiens
cagcaccuacagugu

SEQ ID NO: 39564 - RNA, 18 nt, Homo sapiens
gaaagacuauucaaacag

SEQ ID NO: 39565 - RNA, 11 nt, Homo sapiens
uuaaaaucaca

SEQ ID NO: 39566 - RNA, 19 nt, Homo sapiens
auacauuauuggacuucca

SEQ ID NO: 39567 - RNA, 22 nt, Homo sapiens
aacuuccuuggacucauuuuaa

SEQ ID NO: 39568 - RNA, 18 nt, Homo sapiens
ccagagcguguagugaau

SEQ ID NO: 39569 - RNA, 16 nt, Homo sapiens
cgugauuuugcuguag

SEQ ID NO: 39570 - RNA, 20 nt, Homo sapiens
auaggugcuacaaaaacaca

SEQ ID NO: 39571 - RNA, 23 nt, Homo sapiens
ucucaggaaaucaaauaugcaaa

SEQ ID NO: 39572 - RNA, 17 nt, Homo sapiens
cucauuuuuguuuucau

SEQ ID NO: 39573 - RNA, 16 nt, Homo sapiens
aaucauuucugcauca

SEQ ID NO: 39574 - RNA, 22 nt, Homo sapiens
agaugugggcagugaugucacu

SEQ ID NO: 39575 - RNA, 21 nt, Homo sapiens
acuuccuuggacucauuuuaa

SEQ ID NO: 39576 - RNA, 12 nt, Homo sapiens
ucgaaucacuca

SEQ ID NO: 39577 - RNA, 23 nt, Homo sapiens
ucuuaagacgugauuuugcugua

SEQ ID NO: 39578 - RNA, 17 nt, Homo sapiens
aauacacacucaaauca

SEQ ID NO: 39579 - RNA, 16 nt, Homo sapiens
cucaaaacugcacugu

SEQ ID NO: 39580 - RNA, 18 nt, Homo sapiens
aucacucauuuauuucca

SEQ ID NO: 39581 - RNA, 15 nt, Homo sapiens
ugaacacaaagccug

SEQ ID NO: 39582 - RNA, 23 nt, Homo sapiens
gucucgugguaggacuguagaaa

SEQ ID NO: 39583 - RNA, 18 nt, Homo sapiens
ugcuacaaaaacacagca

SEQ ID NO: 39584 - RNA, 19 nt, Homo sapiens
ugugaacacaucagcuugc

SEQ ID NO: 39585 - RNA, 22 nt, Homo sapiens
acuggcacaguuuucugagaaa

SEQ ID NO: 39586 - RNA, 21 nt, Homo sapiens
caaauaugcaaagcacugacu

SEQ ID NO: 39587 - RNA, 14 nt, Homo sapiens
uccaagcauaccaa

SEQ ID NO: 39588 - RNA, 13 nt, Homo sapiens
cuacaaaaacaca

SEQ ID NO: 39589 - RNA, 15 nt, Homo sapiens
aacugaacauuccag

SEQ ID NO: 39590 - RNA, 18 nt, Homo sapiens
uagcaaauuccaauacau

SEQ ID NO: 39591 - RNA, 23 nt, Homo sapiens
cacugacuucuaaguaaaaccac

SEQ ID NO: 39592 - RNA, 19 nt, Homo sapiens
aaacugcacugucaagaug

SEQ ID NO: 39593 - RNA, 14 nt, Homo sapiens
uaaguaaaaccaca

SEQ ID NO: 39594 - RNA, 14 nt, Homo sapiens
uuuauugcuuguug

SEQ ID NO: 39595 - RNA, 18 nt, Homo sapiens
ugagaaagacuauucaaa

SEQ ID NO: 39596 - RNA, 22 nt, Homo sapiens
cuccaaagaaauguaagggaaa

SEQ ID NO: 39597 - RNA, 13 nt, Homo sapiens
gucuuguguuucu

SEQ ID NO: 39598 - RNA, 14 nt, Homo sapiens
auucuuuaucacau

SEQ ID NO: 39599 - RNA, 23 nt, Homo sapiens
ucacaaaucuuaacuugaaggag

SEQ ID NO: 39600 - RNA, 21 nt, Homo sapiens
cugaccaauauuguacaguuu

SEQ ID NO: 39601 - RNA, 21 nt, Homo sapiens
uuuaaaaucauuucugcauca

SEQ ID NO: 39602 - RNA, 21 nt, Homo sapiens
auuuaauaaaugugccuucau

SEQ ID NO: 39603 - RNA, 23 nt, Homo sapiens
aaaugcugguuuuucaguuuuca

SEQ ID NO: 39604 - RNA, 11 nt, Homo sapiens
aauacugaugu

SEQ ID NO: 39605 - RNA, 23 nt, Homo sapiens
augugcuuuuaaaaaaaaauacu

SEQ ID NO: 39606 - RNA, 14 nt, Homo sapiens
ugaagaaacauuua

SEQ ID NO: 39607 - RNA, 22 nt, Homo sapiens
acaagcaggcucaacauaacau

SEQ ID NO: 39608 - RNA, 12 nt, Homo sapiens
aacugccagcaa

SEQ ID NO: 39609 - RNA, 13 nt, Homo sapiens
uauuggacuucca

SEQ ID NO: 39610 - RNA, 19 nt, Homo sapiens
uucacagccagacuggcac

SEQ ID NO: 39611 - RNA, 20 nt, Homo sapiens
gaacguuuuuccuguucuua

SEQ ID NO: 39612 - RNA, 19 nt, Homo sapiens
agauaaucucuccauuccc

SEQ ID NO: 39613 - RNA, 16 nt, Homo sapiens
auaauaaaauucauuc

SEQ ID NO: 39614 - RNA, 17 nt, Homo sapiens
caaaacugcacugucaa

SEQ ID NO: 39615 - RNA, 21 nt, Homo sapiens
cauucccguggaacguuuuuc

SEQ ID NO: 39616 - RNA, 15 nt, Homo sapiens
uaaaauacacacuca

SEQ ID NO: 39617 - RNA, 18 nt, Homo sapiens
caaaucuuaacuugaagg

SEQ ID NO: 39618 - RNA, 17 nt, Homo sapiens
aagaugaugaugaucuu

SEQ ID NO: 39619 - RNA, 22 nt, Homo sapiens
aggaaaucaaauaugcaaagca

SEQ ID NO: 39620 - RNA, 18 nt, Homo sapiens
agcauaccaacacgagca

SEQ ID NO: 39621 - RNA, 21 nt, Homo sapiens
ucucaaaacugcacugucaag

SEQ ID NO: 39622 - RNA, 21 nt, Homo sapiens
auuucauaccuaucaucuuaa

SEQ ID NO: 39623 - RNA, 16 nt, Homo sapiens
uacauacuauggaauu

SEQ ID NO: 39624 - RNA, 21 nt, Homo sapiens
ucuuauccugucccuccucca

SEQ ID NO: 39625 - RNA, 17 nt, Homo sapiens
cgagcaggcuacuguca

SEQ ID NO: 39626 - RNA, 23 nt, Homo sapiens
ugucucgugguaggacuguagaa

SEQ ID NO: 39627 - RNA, 20 nt, Homo sapiens
uuugaacaacucgaaucacu

SEQ ID NO: 39628 - RNA, 14 nt, Homo sapiens
aaauuuaaauggag

SEQ ID NO: 39629 - RNA, 13 nt, Homo sapiens
acagucucaggaa

SEQ ID NO: 39630 - RNA, 16 nt, Homo sapiens
uuggacuuccauuugg

SEQ ID NO: 39631 - RNA, 16 nt, Homo sapiens
aauuucauaccuauca

SEQ ID NO: 39632 - RNA, 20 nt, Homo sapiens
acacgagcaggcuacuguca

SEQ ID NO: 39633 - RNA, 21 nt, Homo sapiens
uauggcuauaggugcuacaaa

SEQ ID NO: 39634 - RNA, 17 nt, Homo sapiens
ucaaaacugcacuguca

SEQ ID NO: 39635 - RNA, 21 nt, Homo sapiens
aauuucauaccuaucaucuua

SEQ ID NO: 39636 - RNA, 18 nt, Homo sapiens
gacaggauaagagggauu

SEQ ID NO: 39637 - RNA, 20 nt, Homo sapiens
uuaaaaaaaaauacugaugu

SEQ ID NO: 39638 - RNA, 15 nt, Homo sapiens
ucuagaauacuaaua

SEQ ID NO: 39639 - RNA, 15 nt, Homo sapiens
cuguggccaaguucu

SEQ ID NO: 39640 - RNA, 20 nt, Homo sapiens
acagccagacuggcacaguu

SEQ ID NO: 39641 - RNA, 18 nt, Homo sapiens
aaaaccacagcaguugaa

SEQ ID NO: 39642 - RNA, 18 nt, Homo sapiens
aaguacauguuaaacuua

SEQ ID NO: 39643 - RNA, 22 nt, Homo sapiens
cuuuaguuuuugugaaguuuaa

SEQ ID NO: 39644 - RNA, 19 nt, Homo sapiens
auaggugcuacaaaaacac

SEQ ID NO: 39645 - RNA, 19 nt, Homo sapiens
ucaagaugaugaugaucuu

SEQ ID NO: 39646 - RNA, 13 nt, Homo sapiens
aaguaaaaccaca

SEQ ID NO: 39647 - RNA, 20 nt, Homo sapiens
agcaaauuccaauacauuau

SEQ ID NO: 39648 - RNA, 18 nt, Homo sapiens
ugaaagaggcagcuugaa

SEQ ID NO: 39649 - RNA, 19 nt, Homo sapiens
cgugauuuugcuguagaag

SEQ ID NO: 39650 - RNA, 16 nt, Homo sapiens
uauaaaagacugacca

SEQ ID NO: 39651 - RNA, 20 nt, Homo sapiens
ugcaaccccaucauccucag

SEQ ID NO: 39652 - RNA, 23 nt, Homo sapiens
gcuguucacagccagacuggcac

SEQ ID NO: 39653 - RNA, 12 nt, Homo sapiens
uuugcuguagaa

SEQ ID NO: 39654 - RNA, 18 nt, Homo sapiens
gauaaucucuccauuccc

SEQ ID NO: 39655 - RNA, 21 nt, Homo sapiens
agauguagcaaauuccaauac

SEQ ID NO: 39656 - RNA, 18 nt, Homo sapiens
ucuucacaacagauuauu

SEQ ID NO: 39657 - RNA, 15 nt, Homo sapiens
gagaaagacuauuca

SEQ ID NO: 39658 - RNA, 16 nt, Homo sapiens
aagaugaugaugaucu

SEQ ID NO: 39659 - RNA, 16 nt, Homo sapiens
acacacucaaaucaag

SEQ ID NO: 39660 - RNA, 19 nt, Homo sapiens
ucgugguaggacuguagaa

SEQ ID NO: 39661 - RNA, 13 nt, Homo sapiens
cagcuguuuaugc

SEQ ID NO: 39662 - RNA, 18 nt, Homo sapiens
ugugaaguuuaauugacu

SEQ ID NO: 39663 - RNA, 16 nt, Homo sapiens
uauagaaaugcugguu

SEQ ID NO: 39664 - RNA, 16 nt, Homo sapiens
auggcuauaggugcua

SEQ ID NO: 39665 - RNA, 17 nt, Homo sapiens
gagcaggcuacugucag

SEQ ID NO: 39666 - RNA, 21 nt, Homo sapiens
aucuuuaaaauacacacucaa

SEQ ID NO: 39667 - RNA, 11 nt, Homo sapiens
guauauucaaa

SEQ ID NO: 39668 - RNA, 21 nt, Homo sapiens
acuucugucuucacaacagau

SEQ ID NO: 39669 - RNA, 13 nt, Homo sapiens
gcagugaugucac

SEQ ID NO: 39670 - RNA, 22 nt, Homo sapiens
caacacgagcaggcuacuguca

SEQ ID NO: 39671 - RNA, 18 nt, Homo sapiens
gcaggcccccaggugcca

SEQ ID NO: 39672 - RNA, 18 nt, Homo sapiens
aaguucuuaguugcugua

SEQ ID NO: 39673 - RNA, 14 nt, Homo sapiens
aucacucauuuauu

SEQ ID NO: 39674 - RNA, 19 nt, Homo sapiens
aguuauggcuauaggugcu

SEQ ID NO: 39675 - RNA, 23 nt, Homo sapiens
uauugauaauaaaauucauucca

SEQ ID NO: 39676 - RNA, 22 nt, Homo sapiens
aaacugagaugugaacacauca

SEQ ID NO: 39677 - RNA, 21 nt, Homo sapiens
aaacugagaugugaacacauc

SEQ ID NO: 39678 - RNA, 11 nt, Homo sapiens
ucauuaucuca

SEQ ID NO: 39679 - RNA, 16 nt, Homo sapiens
gaaguuuaauugacuu

SEQ ID NO: 39680 - RNA, 20 nt, Homo sapiens
caucagcuugcccuguuaaa

SEQ ID NO: 39681 - RNA, 22 nt, Homo sapiens
uccaagcauaccaacacgagca

SEQ ID NO: 39682 - RNA, 18 nt, Homo sapiens
auuuuucagauauaaaag

SEQ ID NO: 39683 - RNA, 13 nt, Homo sapiens
ggacuuccauuug

SEQ ID NO: 39684 - RNA, 20 nt, Homo sapiens
caaaaauuauauuuugaaca

SEQ ID NO: 39685 - RNA, 18 nt, Homo sapiens
auaaaauucauuccauuu

SEQ ID NO: 39686 - RNA, 18 nt, Homo sapiens
uucccaaauuucauaccu

SEQ ID NO: 39687 - RNA, 21 nt, Homo sapiens
ugcuguagaagauggcacuua

SEQ ID NO: 39688 - RNA, 16 nt, Homo sapiens
caaaucuuaacuugaa

SEQ ID NO: 39689 - RNA, 22 nt, Homo sapiens
aaaauauuuguaucacaaaucu

SEQ ID NO: 39690 - RNA, 15 nt, Homo sapiens
cacaaacucauccau

SEQ ID NO: 39691 - RNA, 15 nt, Homo sapiens
acuucugucuucaca

SEQ ID NO: 39692 - RNA, 14 nt, Homo sapiens
uuaaacuuacuuag

SEQ ID NO: 39693 - RNA, 18 nt, Homo sapiens
ucucgugguaggacugua

SEQ ID NO: 39694 - RNA, 23 nt, Homo sapiens
ucagauauaaaagacugaccaau

SEQ ID NO: 39695 - RNA, 19 nt, Homo sapiens
uggcacaguuuucugagaa

SEQ ID NO: 39696 - RNA, 22 nt, Homo sapiens
aauacugauguuccuagugaaa

SEQ ID NO: 39697 - RNA, 20 nt, Homo sapiens
aagacuauucaaacagucuc

SEQ ID NO: 39698 - RNA, 18 nt, Homo sapiens
gacgugauuuugcuguag

SEQ ID NO: 39699 - RNA, 18 nt, Homo sapiens
accauaaauuuaaaugga

SEQ ID NO: 39700 - RNA, 15 nt, Homo sapiens
ugcaucagcugcuga

SEQ ID NO: 39701 - RNA, 15 nt, Homo sapiens
gaaucauaugggaua

SEQ ID NO: 39702 - RNA, 19 nt, Homo sapiens
ucuaaguaaaaccacagca

SEQ ID NO: 39703 - RNA, 22 nt, Homo sapiens
agaagauggcacuuauaaccaa

SEQ ID NO: 39704 - RNA, 15 nt, Homo sapiens
gcaggcuacugucag

SEQ ID NO: 39705 - RNA, 19 nt, Homo sapiens
uucuacauacuauggaauu

SEQ ID NO: 39706 - RNA, 17 nt, Homo sapiens
agcauuguaaaugugcu

SEQ ID NO: 39707 - RNA, 19 nt, Homo sapiens
guguacagucuuguauuaa

SEQ ID NO: 39708 - RNA, 15 nt, Homo sapiens
uugaaacugagaugu

SEQ ID NO: 39709 - RNA, 15 nt, Homo sapiens
gaacugaacauucca

SEQ ID NO: 39710 - RNA, 20 nt, Homo sapiens
ucauuuuaaaaaauggaaca

SEQ ID NO: 39711 - RNA, 16 nt, Homo sapiens
gagcaggcuacuguca

SEQ ID NO: 39712 - RNA, 17 nt, Homo sapiens
cacauuuuucagauaua

SEQ ID NO: 39713 - RNA, 20 nt, Homo sapiens
gacuucugucuucacaacag

SEQ ID NO: 39714 - RNA, 9 nt, Homo sapiens
agagaagau

SEQ ID NO: 39715 - RNA, 12 nt, Homo sapiens
cauuccauuugc

SEQ ID NO: 39716 - RNA, 15 nt, Homo sapiens
auuucugcaucagcu

SEQ ID NO: 39717 - RNA, 21 nt, Homo sapiens
ugucuuaauuaaaagaauauu

SEQ ID NO: 39718 - RNA, 21 nt, Homo sapiens
ccauucuacauacuauggaau

SEQ ID NO: 39719 - RNA, 15 nt, Homo sapiens
guugcuguaugucuc

SEQ ID NO: 39720 - RNA, 19 nt, Homo sapiens
uaaguuacacauuuuucag

SEQ ID NO: 39721 - RNA, 22 nt, Homo sapiens
cggagaagagcuguucacagcc

SEQ ID NO: 39722 - RNA, 14 nt, Homo sapiens
uagaagauggcacu

SEQ ID NO: 39723 - RNA, 16 nt, Homo sapiens
aaucucuccauucccg

SEQ ID NO: 39724 - RNA, 15 nt, Homo sapiens
aaaucuuaacuugaa

SEQ ID NO: 39725 - RNA, 14 nt, Homo sapiens
aacugcacugucaa

SEQ ID NO: 39726 - RNA, 20 nt, Homo sapiens
cucgugguaggacuguagaa

SEQ ID NO: 39727 - RNA, 15 nt, Homo sapiens
uacaaaaacacagca

SEQ ID NO: 39728 - RNA, 16 nt, Homo sapiens
uaauucuuuaucacau

SEQ ID NO: 39729 - RNA, 17 nt, Homo sapiens
cuauucaaacagucuca

SEQ ID NO: 39730 - RNA, 16 nt, Homo sapiens
aaacauuuaucuuugu

SEQ ID NO: 39731 - RNA, 22 nt, Homo sapiens
cuuaagacgugauuuugcugua

SEQ ID NO: 39732 - RNA, 20 nt, Homo sapiens
ucauuaucucaaaacugcac

SEQ ID NO: 39733 - RNA, 21 nt, Homo sapiens
uuuaaaaaaaaauacugaugu

SEQ ID NO: 39734 - RNA, 17 nt, Homo sapiens
auacauacuauagauuc

SEQ ID NO: 39735 - RNA, 22 nt, Homo sapiens
ucagcaccuacaguguacaguc

SEQ ID NO: 39736 - RNA, 21 nt, Homo sapiens
cacagcaagggugaugggaaa

SEQ ID NO: 39737 - RNA, 15 nt, Homo sapiens
gccaguuauggcuau

SEQ ID NO: 39738 - RNA, 16 nt, Homo sapiens
cuugaaacugagaugu

SEQ ID NO: 39739 - RNA, 15 nt, Homo sapiens
aguuguuaauaaaag

SEQ ID NO: 39740 - RNA, 19 nt, Homo sapiens
aaucacucauuuauuucca

SEQ ID NO: 39741 - RNA, 16 nt, Homo sapiens
ucagcaccuacagugu

SEQ ID NO: 39742 - RNA, 20 nt, Homo sapiens
auaaagcacuguuuggauau

SEQ ID NO: 39743 - RNA, 18 nt, Homo sapiens
ggacaggauaagagggau

SEQ ID NO: 39744 - RNA, 18 nt, Homo sapiens
acaucagcuugcccuguu

SEQ ID NO: 39745 - RNA, 22 nt, Homo sapiens
acgagcaggcuacugucagcuc

SEQ ID NO: 39746 - RNA, 16 nt, Homo sapiens
uagaaaagggaacuga

SEQ ID NO: 39747 - RNA, 22 nt, Homo sapiens
cuguagaaaagggaacugaaca

SEQ ID NO: 39748 - RNA, 19 nt, Homo sapiens
uaaaaucauuucugcauca

SEQ ID NO: 39749 - RNA, 20 nt, Homo sapiens
aucaaauaugcaaagcacug

SEQ ID NO: 39750 - RNA, 17 nt, Homo sapiens
aaggaguccuugcauca

SEQ ID NO: 39751 - RNA, 19 nt, Homo sapiens
ccaaauuucauaccuauca

SEQ ID NO: 39752 - RNA, 23 nt, Homo sapiens
ugaaacugagaugugaacacauc

SEQ ID NO: 39753 - RNA, 20 nt, Homo sapiens
acuucuaaguaaaaccacag

SEQ ID NO: 39754 - RNA, 16 nt, Homo sapiens
auguagauaaagcacu

SEQ ID NO: 39755 - RNA, 16 nt, Homo sapiens
ucuacauacuauggaa

SEQ ID NO: 39756 - RNA, 16 nt, Homo sapiens
ucauaccuaucaucuu

SEQ ID NO: 39757 - RNA, 19 nt, Homo sapiens
uagugaaguaugcacuaau

SEQ ID NO: 39758 - RNA, 14 nt, Homo sapiens
aaagacuccaaaga

SEQ ID NO: 39759 - RNA, 18 nt, Homo sapiens
uaauguagauaaagcacu

SEQ ID NO: 39760 - RNA, 16 nt, Homo sapiens
uacaaaaacacagcaa

SEQ ID NO: 39761 - RNA, 14 nt, Homo sapiens
gcuguagaagaugg

SEQ ID NO: 39762 - RNA, 16 nt, Homo sapiens
uaagggaaacugccag

SEQ ID NO: 39763 - RNA, 18 nt, Homo sapiens
cacaaacucauccauuaa

SEQ ID NO: 39764 - RNA, 19 nt, Homo sapiens
aacaacucgaaucacucau

SEQ ID NO: 39765 - RNA, 13 nt, Homo sapiens
aauuccaauacau

SEQ ID NO: 39766 - RNA, 15 nt, Homo sapiens
uggacuuccauuugg

SEQ ID NO: 39767 - RNA, 14 nt, Homo sapiens
ugaacacaucagcu

SEQ ID NO: 39768 - RNA, 14 nt, Homo sapiens
cuagaauacuaaua

SEQ ID NO: 39769 - RNA, 16 nt, Homo sapiens
caggcucaacauaaca

SEQ ID NO: 39770 - RNA, 14 nt, Homo sapiens
guuuucauuaucuc

SEQ ID NO: 39771 - RNA, 13 nt, Homo sapiens
uguaaaugugcuu

SEQ ID NO: 39772 - RNA, 18 nt, Homo sapiens
cuuuuuuuuaaguuacac

SEQ ID NO: 39773 - RNA, 22 nt, Homo sapiens
caauacauuauuggacuuccau

SEQ ID NO: 39774 - RNA, 20 nt, Homo sapiens
gagcaggcuacugucagcuc

SEQ ID NO: 39775 - RNA, 13 nt, Homo sapiens
uuuaaaaaaugga

SEQ ID NO: 39776 - RNA, 22 nt, Homo sapiens
acuucuaaguaaaaccacagca

SEQ ID NO: 39777 - RNA, 17 nt, Homo sapiens
gcauuguaaaugugcuu

SEQ ID NO: 39778 - RNA, 23 nt, Homo sapiens
ucaacaagagacuggaaggacca

SEQ ID NO: 39779 - RNA, 20 nt, Homo sapiens
uagauaaucucuccauuccc

SEQ ID NO: 39780 - RNA, 17 nt, Homo sapiens
gugccaguuauggcuau

SEQ ID NO: 39781 - RNA, 21 nt, Homo sapiens
uaaaaucacaaacucauccau

SEQ ID NO: 39782 - RNA, 11 nt, Homo sapiens
aagcauuguaa

SEQ ID NO: 39783 - RNA, 20 nt, Homo sapiens
uguucacagccagacuggca

SEQ ID NO: 39784 - RNA, 19 nt, Homo sapiens
cucauuuauuuccauauua

SEQ ID NO: 39785 - RNA, 16 nt, Homo sapiens
ucacaaacucauccau

SEQ ID NO: 39786 - RNA, 21 nt, Homo sapiens
aacacgagcaggcuacuguca

SEQ ID NO: 39787 - RNA, 15 nt, Homo sapiens
acucauuuauuucca

SEQ ID NO: 39788 - RNA, 14 nt, Homo sapiens
uuaauaaaaguaca

SEQ ID NO: 39789 - RNA, 13 nt, Homo sapiens
acaaaaacacagc

SEQ ID NO: 39790 - RNA, 18 nt, Homo sapiens
aaguagggacuucugucu

SEQ ID NO: 39791 - RNA, 21 nt, Homo sapiens
ucaaauaugcaaagcacugac

SEQ ID NO: 39792 - RNA, 22 nt, Homo sapiens
uagugaaucacguaaagcuaga

SEQ ID NO: 39793 - RNA, 16 nt, Homo sapiens
cacucauuuauuucca

SEQ ID NO: 39794 - RNA, 13 nt, Homo sapiens
uagauucuuuauu

SEQ ID NO: 39795 - RNA, 18 nt, Homo sapiens
cucaaaauaccaugccau

SEQ ID NO: 39796 - RNA, 23 nt, Homo sapiens
uucagauauaaaagacugaccaa

SEQ ID NO: 39797 - RNA, 17 nt, Homo sapiens
acauuauuggacuucca

SEQ ID NO: 39798 - RNA, 14 nt, Homo sapiens
aaauacauacuaua

SEQ ID NO: 39799 - RNA, 13 nt, Homo sapiens
aauguuguucucu

SEQ ID NO: 39800 - RNA, 17 nt, Homo sapiens
uucugagaaagacuauu

SEQ ID NO: 39801 - RNA, 19 nt, Homo sapiens
auaauaaaauucauuccau

SEQ ID NO: 39802 - RNA, 18 nt, Homo sapiens
uacuauagauucuuuauu

SEQ ID NO: 39803 - RNA, 19 nt, Homo sapiens
uauuagugaaguaugcacu

SEQ ID NO: 39804 - RNA, 16 nt, Homo sapiens
gcuacaaaaacacagc

SEQ ID NO: 39805 - RNA, 14 nt, Homo sapiens
agccagacuggcac

SEQ ID NO: 39806 - RNA, 18 nt, Homo sapiens
aaguccaagcauaccaac

SEQ ID NO: 39807 - RNA, 15 nt, Homo sapiens
gugaaagaggcagcu

SEQ ID NO: 39808 - RNA, 12 nt, Homo sapiens
aaaaagccaaaa

SEQ ID NO: 39809 - RNA, 13 nt, Homo sapiens
aaaaagcuacuua

SEQ ID NO: 39810 - RNA, 13 nt, Homo sapiens
aaaaaggugacca

SEQ ID NO: 39811 - RNA, 17 nt, Homo sapiens
aaaaauaaagcacuuau

SEQ ID NO: 39812 - RNA, 21 nt, Homo sapiens
aaaaaugguuuaaauggucaa

SEQ ID NO: 39813 - RNA, 19 nt, Homo sapiens
aaaacaccaggauuuaagu

SEQ ID NO: 39814 - RNA, 14 nt, Homo sapiens
aaaacguauugcau

SEQ ID NO: 39815 - RNA, 19 nt, Homo sapiens
aaaacguauugcauuuaau

SEQ ID NO: 39816 - RNA, 22 nt, Homo sapiens
aaaacuuauccuccaugaauau

SEQ ID NO: 39817 - RNA, 15 nt, Homo sapiens
aaaagaaacauuugg

SEQ ID NO: 39818 - RNA, 12 nt, Homo sapiens
aaaagaaagaaa

SEQ ID NO: 39819 - RNA, 11 nt, Homo sapiens
aaaagcacuua

SEQ ID NO: 39820 - RNA, 18 nt, Homo sapiens
aaaagcaguaacugacaa

SEQ ID NO: 39821 - RNA, 11 nt, Homo sapiens
aaaagccaaaa

SEQ ID NO: 39822 - RNA, 16 nt, Homo sapiens
aaaagccaaaaaccaa

SEQ ID NO: 39823 - RNA, 21 nt, Homo sapiens
aaaagcuacuuauuguagcau

SEQ ID NO: 39824 - RNA, 12 nt, Homo sapiens
aaaaggaagaaa

SEQ ID NO: 39825 - RNA, 23 nt, Homo sapiens
aaaaggccugucccugcagacau

SEQ ID NO: 39826 - RNA, 16 nt, Homo sapiens
aaaagggaacugaaca

SEQ ID NO: 39827 - RNA, 16 nt, Homo sapiens
aaaaguugaauuuuac

SEQ ID NO: 39828 - RNA, 12 nt, Homo sapiens
aaaauacauacu

SEQ ID NO: 39829 - RNA, 16 nt, Homo sapiens
aaaauaccagccagua

SEQ ID NO: 39830 - RNA, 10 nt, Homo sapiens
aaaauaugcc

SEQ ID NO: 39831 - RNA, 19 nt, Homo sapiens
aaaauauuuuuaugugcaa

SEQ ID NO: 39832 - RNA, 22 nt, Homo sapiens
aaaauauuuuuaugugcaauaa

SEQ ID NO: 39833 - RNA, 16 nt, Homo sapiens
aaaaucacaaacucau

SEQ ID NO: 39834 - RNA, 15 nt, Homo sapiens
aaaaucauuucugca

SEQ ID NO: 39835 - RNA, 20 nt, Homo sapiens
aaaaucauuucugcaucagc

SEQ ID NO: 39836 - RNA, 14 nt, Homo sapiens
aaaaugagcaaaag

SEQ ID NO: 39837 - RNA, 14 nt, Homo sapiens
aaaauggaauacuc

SEQ ID NO: 39838 - RNA, 16 nt, Homo sapiens
aaaauggccagugaga

SEQ ID NO: 39839 - RNA, 12 nt, Homo sapiens
aaaaugugcaau

SEQ ID NO: 39840 - RNA, 17 nt, Homo sapiens
aaaauguucuaaauauc

SEQ ID NO: 39841 - RNA, 14 nt, Homo sapiens
aaaauucauuccau

SEQ ID NO: 39842 - RNA, 20 nt, Homo sapiens
aaaauucauuccauuugcug

SEQ ID NO: 39843 - RNA, 11 nt, Homo sapiens
aaacacauuuu

SEQ ID NO: 39844 - RNA, 16 nt, Homo sapiens
aaacaccucagcugcc

SEQ ID NO: 39845 - RNA, 20 nt, Homo sapiens
aaacacuaaaaaggcaugua

SEQ ID NO: 39846 - RNA, 14 nt, Homo sapiens
aaacauagcaucuc

SEQ ID NO: 39847 - RNA, 17 nt, Homo sapiens
aaacauagcaucucagg

SEQ ID NO: 39848 - RNA, 16 nt, Homo sapiens
aaacauccagauacac

SEQ ID NO: 39849 - RNA, 14 nt, Homo sapiens
aaacauguauguaa

SEQ ID NO: 39850 - RNA, 22 nt, Homo sapiens
aaacauguauguaaauagcuaa

SEQ ID NO: 39851 - RNA, 15 nt, Homo sapiens
aaacauguucacuua

SEQ ID NO: 39852 - RNA, 23 nt, Homo sapiens
aaacauuuaaauuauacaaucau

SEQ ID NO: 39853 - RNA, 16 nt, Homo sapiens
aaacauuuaucuuugu

SEQ ID NO: 39854 - RNA, 23 nt, Homo sapiens
aaacauuuaucuuuguacguucu

SEQ ID NO: 39855 - RNA, 14 nt, Homo sapiens
aaacauuugguaag

SEQ ID NO: 39856 - RNA, 13 nt, Homo sapiens
aaacccggccuga

SEQ ID NO: 39857 - RNA, 17 nt, Homo sapiens
aaacccggccugauuaa

SEQ ID NO: 39858 - RNA, 12 nt, Homo sapiens
aaaccuaugaau

SEQ ID NO: 39859 - RNA, 14 nt, Homo sapiens
aaaccucaagccag

SEQ ID NO: 39860 - RNA, 16 nt, Homo sapiens
aaacguauugcauuua

SEQ ID NO: 39861 - RNA, 17 nt, Homo sapiens
aaacgucuuaaauauuc

SEQ ID NO: 39862 - RNA, 15 nt, Homo sapiens
aaacgugauuuuuaa

SEQ ID NO: 39863 - RNA, 21 nt, Homo sapiens
aaacuaccagcccuacaccau

SEQ ID NO: 39864 - RNA, 16 nt, Homo sapiens
aaacuaguuacuaaac

SEQ ID NO: 39865 - RNA, 20 nt, Homo sapiens
aaacuccacauccuguggga

SEQ ID NO: 39866 - RNA, 19 nt, Homo sapiens
aaacugcacugucaagaug

SEQ ID NO: 39867 - RNA, 19 nt, Homo sapiens
aaacuggguuccugcaaug

SEQ ID NO: 39868 - RNA, 18 nt, Homo sapiens
aaacuuuaugcuaaguga

SEQ ID NO: 39869 - RNA, 20 nt, Homo sapiens
aaacuuuaugcuaagugaaa

SEQ ID NO: 39870 - RNA, 19 nt, Homo sapiens
aaacuuucacaccccagac

SEQ ID NO: 39871 - RNA, 22 nt, Homo sapiens
aaacuuugauuuuauaugcuau

SEQ ID NO: 39872 - RNA, 21 nt, Homo sapiens
aaacuuuuccaaugacauuuu

SEQ ID NO: 39873 - RNA, 13 nt, Homo sapiens
aaacuuuuggaag

SEQ ID NO: 39874 - RNA, 21 nt, Homo sapiens
aaagaaaaucaggcuggccaa

SEQ ID NO: 39875 - RNA, 13 nt, Homo sapiens
aaagaaacauuug

SEQ ID NO: 39876 - RNA, 16 nt, Homo sapiens
aaagaaacauuuggua

SEQ ID NO: 39877 - RNA, 13 nt, Homo sapiens
aaagaacaggaaa

SEQ ID NO: 39878 - RNA, 12 nt, Homo sapiens
aaagaagagccg

SEQ ID NO: 39879 - RNA, 15 nt, Homo sapiens
aaagacaaagacaaa

SEQ ID NO: 39880 - RNA, 17 nt, Homo sapiens
aaagacuaugaggaaua

SEQ ID NO: 39881 - RNA, 14 nt, Homo sapiens
aaagacuccaaaga

SEQ ID NO: 39882 - RNA, 15 nt, Homo sapiens
aaagaggcagcuuga

SEQ ID NO: 39883 - RNA, 13 nt, Homo sapiens
aaagauacaguua

SEQ ID NO: 39884 - RNA, 15 nt, Homo sapiens
aaagauacaguuacu

SEQ ID NO: 39885 - RNA, 19 nt, Homo sapiens
aaagaucugcaacuacuau

SEQ ID NO: 39886 - RNA, 13 nt, Homo sapiens
aaagaugaauguc

SEQ ID NO: 39887 - RNA, 15 nt, Homo sapiens
aaagcacugacuucu

SEQ ID NO: 39888 - RNA, 16 nt, Homo sapiens
aaagcagggacuugaa

SEQ ID NO: 39889 - RNA, 14 nt, Homo sapiens
aaagcaugugagac

SEQ ID NO: 39890 - RNA, 17 nt, Homo sapiens
aaagcauuguaacuuau

SEQ ID NO: 39891 - RNA, 16 nt, Homo sapiens
aaagccaaaaaccaaa

SEQ ID NO: 39892 - RNA, 18 nt, Homo sapiens
aaagcugaguguuucaca

SEQ ID NO: 39893 - RNA, 16 nt, Homo sapiens
aaagcuuugugcagau

SEQ ID NO: 39894 - RNA, 17 nt, Homo sapiens
aaaggaagguucuggug

SEQ ID NO: 39895 - RNA, 18 nt, Homo sapiens
aaaggaugcacagaguug

SEQ ID NO: 39896 - RNA, 14 nt, Homo sapiens
aaaggccugucccu

SEQ ID NO: 39897 - RNA, 10 nt, Homo sapiens
aaagggaugg

SEQ ID NO: 39898 - RNA, 12 nt, Homo sapiens
aaagggauggca

SEQ ID NO: 39899 - RNA, 18 nt, Homo sapiens
aaagggcuguuauaaucu

SEQ ID NO: 39900 - RNA, 22 nt, Homo sapiens
aaagggucucccucuguugcca

SEQ ID NO: 39901 - RNA, 11 nt, Homo sapiens
aaaggugacca

SEQ ID NO: 39902 - RNA, 17 nt, Homo sapiens
aaagucagugcccaacu

SEQ ID NO: 39903 - RNA, 23 nt, Homo sapiens
aaagucagugcccaacuguuaua

SEQ ID NO: 39904 - RNA, 17 nt, Homo sapiens
aaaguguaaguucacaa

SEQ ID NO: 39905 - RNA, 17 nt, Homo sapiens
aaagugugacucauuaa

SEQ ID NO: 39906 - RNA, 14 nt, Homo sapiens
aaaguucuagugac

SEQ ID NO: 39907 - RNA, 21 nt, Homo sapiens
aaaguuuuggaaacguauuca

SEQ ID NO: 39908 - RNA, 15 nt, Homo sapiens
aaauaaaagcacuua

SEQ ID NO: 39909 - RNA, 21 nt, Homo sapiens
aaauaacuaggcguggacuua

SEQ ID NO: 39910 - RNA, 17 nt, Homo sapiens
aaauaagccagacauca

SEQ ID NO: 39911 - RNA, 13 nt, Homo sapiens
aaauaaugaaaua

SEQ ID NO: 39912 - RNA, 18 nt, Homo sapiens
aaauaauuuuuauauuug

SEQ ID NO: 39913 - RNA, 23 nt, Homo sapiens
aaauacacuguuaucuucacuuu

SEQ ID NO: 39914 - RNA, 15 nt, Homo sapiens
aaauaccagccagua

SEQ ID NO: 39915 - RNA, 12 nt, Homo sapiens
aaauagugucug

SEQ ID NO: 39916 - RNA, 13 nt, Homo sapiens
aaauagugucuga

SEQ ID NO: 39917 - RNA, 19 nt, Homo sapiens
aaauaguuuaugauuccac

SEQ ID NO: 39918 - RNA, 17 nt, Homo sapiens
aaauauaauaugcacac

SEQ ID NO: 39919 - RNA, 16 nt, Homo sapiens
aaauauaggaacuuaa

SEQ ID NO: 39920 - RNA, 23 nt, Homo sapiens
aaauauugacuuuuuauggcacu

SEQ ID NO: 39921 - RNA, 23 nt, Homo sapiens
aaauauuguugacaacugugacu

SEQ ID NO: 39922 - RNA, 20 nt, Homo sapiens
aaauauuuuuaugugcaaua

SEQ ID NO: 39923 - RNA, 22 nt, Homo sapiens
aaauauuuuuaugugcaauaaa

SEQ ID NO: 39924 - RNA, 19 nt, Homo sapiens
aaaucaaauaugcaaagca

SEQ ID NO: 39925 - RNA, 18 nt, Homo sapiens
aaaucacaaacucaucca

SEQ ID NO: 39926 - RNA, 15 nt, Homo sapiens
aaaucuuaacuugaa

SEQ ID NO: 39927 - RNA, 15 nt, Homo sapiens
aaaugauaauuugcu

SEQ ID NO: 39928 - RNA, 13 nt, Homo sapiens
aaaugauguuuca

SEQ ID NO: 39929 - RNA, 18 nt, Homo sapiens
aaaugauuucacagugug

SEQ ID NO: 39930 - RNA, 16 nt, Homo sapiens
aaaugcugguuuuuca

SEQ ID NO: 39931 - RNA, 23 nt, Homo sapiens
aaaugcugguuuuucaguuuuca

SEQ ID NO: 39932 - RNA, 15 nt, Homo sapiens
aaauggagugacuua

SEQ ID NO: 39933 - RNA, 17 nt, Homo sapiens
aaauggauaugacacau

SEQ ID NO: 39934 - RNA, 20 nt, Homo sapiens
aaaugggcuacuuuguccuu

SEQ ID NO: 39935 - RNA, 16 nt, Homo sapiens
aaaugggggugcauuu

SEQ ID NO: 39936 - RNA, 18 nt, Homo sapiens
aaaugggggugcauuuga

SEQ ID NO: 39937 - RNA, 13 nt, Homo sapiens
aaauguacagcaa

SEQ ID NO: 39938 - RNA, 11 nt, Homo sapiens
aaauguauucu

SEQ ID NO: 39939 - RNA, 21 nt, Homo sapiens
aaauguauucuuuuaguuuuu

SEQ ID NO: 39940 - RNA, 22 nt, Homo sapiens
aaaugucauuguucuugugaac

SEQ ID NO: 39941 - RNA, 12 nt, Homo sapiens
aaaugugcaaua

SEQ ID NO: 39942 - RNA, 21 nt, Homo sapiens
aaauguucaucaaugaaugaa

SEQ ID NO: 39943 - RNA, 11 nt, Homo sapiens
aaauuaacuuu

SEQ ID NO: 39944 - RNA, 23 nt, Homo sapiens
aaauucgcugcaaccuguugaua

SEQ ID NO: 39945 - RNA, 19 nt, Homo sapiens
aaauugaaaggcauucucu

SEQ ID NO: 39946 - RNA, 14 nt, Homo sapiens
aaauuuaaauggag

SEQ ID NO: 39947 - RNA, 21 nt, Homo sapiens
aaauuugguucuaggccgggc

SEQ ID NO: 39948 - RNA, 16 nt, Homo sapiens
aaauuuuauagugucu

SEQ ID NO: 39949 - RNA, 15 nt, Homo sapiens
aaauuuuuauguaau

SEQ ID NO: 39950 - RNA, 22 nt, Homo sapiens
aaauuuuuucucuaggaaauau

SEQ ID NO: 39951 - RNA, 18 nt, Homo sapiens
aacaacucgaaucacuca

SEQ ID NO: 39952 - RNA, 19 nt, Homo sapiens
aacaacucgaaucacucau

SEQ ID NO: 39953 - RNA, 15 nt, Homo sapiens
aacaaggaugaauua

SEQ ID NO: 39954 - RNA, 17 nt, Homo sapiens
aacaagucagucauuca

SEQ ID NO: 39955 - RNA, 21 nt, Homo sapiens
aacaaugacuuguacucugaa

SEQ ID NO: 39956 - RNA, 17 nt, Homo sapiens
aacaaugcuguauuuua

SEQ ID NO: 39957 - RNA, 13 nt, Homo sapiens
aacacagugucug

SEQ ID NO: 39958 - RNA, 21 nt, Homo sapiens
aacaccaggauuuaaguuuca

SEQ ID NO: 39959 - RNA, 21 nt, Homo sapiens
aacacgagcaggcuacuguca

SEQ ID NO: 39960 - RNA, 12 nt, Homo sapiens
aaaaaaacguau

SEQ ID NO: 39961 - RNA, 12 nt, Homo sapiens
aaaaaaagccaa

SEQ ID NO: 39962 - RNA, 21 nt, Homo sapiens
aaaaaaauuuuauagugucuu

SEQ ID NO: 39963 - RNA, 19 nt, Homo sapiens
aaaaaacaccaggauuuaa

SEQ ID NO: 39964 - RNA, 20 nt, Homo sapiens
aaaaaacguauugcauuuaa

SEQ ID NO: 39965 - RNA, 12 nt, Homo sapiens
aaaaaagccaaa

SEQ ID NO: 39966 - RNA, 14 nt, Homo sapiens
aaaaacguauugca

SEQ ID NO: 39967 - RNA, 15 nt, Homo sapiens
aaaaacguauugcau

SEQ ID NO: 39968 - RNA, 15 nt, Homo sapiens
aaaaagaaacauuug

SEQ ID NO: 39969 - RNA, 16 nt, Homo sapiens
aaaaaggaugcacaga

SEQ ID NO: 39970 - RNA, 15 nt, Homo sapiens
aaaacaggcaaauuc

SEQ ID NO: 39971 - RNA, 20 nt, Homo sapiens
aaaaccaaauuuguauuuaa

SEQ ID NO: 39972 - RNA, 18 nt, Homo sapiens
aaaaccacagcaguugaa

SEQ ID NO: 39973 - RNA, 20 nt, Homo sapiens
aaaacguauugcauuuaauu

SEQ ID NO: 39974 - RNA, 23 nt, Homo sapiens
aaaacguauugcauuuaauuuau

SEQ ID NO: 39975 - RNA, 13 nt, Homo sapiens
aaaacucauuucc

SEQ ID NO: 39976 - RNA, 20 nt, Homo sapiens
aaaacucauuuccuauguaa

SEQ ID NO: 39977 - RNA, 19 nt, Homo sapiens
aaaacuuuaugcuaaguga

SEQ ID NO: 39978 - RNA, 11 nt, Homo sapiens
aaaagacauaa

SEQ ID NO: 39979 - RNA, 15 nt, Homo sapiens
aaaagacuccaaaga

SEQ ID NO: 39980 - RNA, 13 nt, Homo sapiens
aaaagacugacca

SEQ ID NO: 39981 - RNA, 14 nt, Homo sapiens
aaaagacugaccaa

SEQ ID NO: 39982 - RNA, 20 nt, Homo sapiens
aaaagauuguauagugcaug

SEQ ID NO: 39983 - RNA, 12 nt, Homo sapiens
aaaagccaaaaa

SEQ ID NO: 39984 - RNA, 11 nt, Homo sapiens
aaaaggugacc

SEQ ID NO: 39985 - RNA, 15 nt, Homo sapiens
aaaaggugucuugcu

SEQ ID NO: 39986 - RNA, 14 nt, Homo sapiens
aaaaguagaauaaa

SEQ ID NO: 39987 - RNA, 15 nt, Homo sapiens
aaaaguugaauuuua

SEQ ID NO: 39988 - RNA, 16 nt, Homo sapiens
aaaauaauuuuuauau

SEQ ID NO: 39989 - RNA, 20 nt, Homo sapiens
aaaauaauuuuuauauuuga

SEQ ID NO: 39990 - RNA, 14 nt, Homo sapiens
aaaauacauacuau

SEQ ID NO: 39991 - RNA, 14 nt, Homo sapiens
aaaauaccaugcca

SEQ ID NO: 39992 - RNA, 22 nt, Homo sapiens
aaaauauuuguaucacaaaucu

SEQ ID NO: 39993 - RNA, 19 nt, Homo sapiens
aaaaucacaaacucaucca

SEQ ID NO: 39994 - RNA, 19 nt, Homo sapiens
aaaaucauuucugcaucag

SEQ ID NO: 39995 - RNA, 17 nt, Homo sapiens
aaaauccauacauuugu

SEQ ID NO: 39996 - RNA, 19 nt, Homo sapiens
aaaaucucaauauuucaga

SEQ ID NO: 39997 - RNA, 14 nt, Homo sapiens
aaaaugaauaucua

SEQ ID NO: 39998 - RNA, 15 nt, Homo sapiens
aaaauggaauacucu

SEQ ID NO: 39999 - RNA, 16 nt, Homo sapiens
aaaauggugugaccac

SEQ ID NO: 40000 - RNA, 23 nt, Homo sapiens
aaaaugucauuguucuugugaac

SEQ ID NO: 40001 - RNA, 13 nt, Homo sapiens
aaaaugugcaaua

SEQ ID NO: 40002 - RNA, 15 nt, Homo sapiens
aaaaugugcaauaug

SEQ ID NO: 40003 - RNA, 21 nt, Homo sapiens
aaaauuagccgggcauggugg

SEQ ID NO: 40004 - RNA, 17 nt, Homo sapiens
aaaauuaucaauaucua

SEQ ID NO: 40005 - RNA, 12 nt, Homo sapiens
aaacacauuuuu

SEQ ID NO: 40006 - RNA, 15 nt, Homo sapiens
aaacaccaggauuua

SEQ ID NO: 40007 - RNA, 16 nt, Homo sapiens
aaacaccaggauuuaa

SEQ ID NO: 40008 - RNA, 13 nt, Homo sapiens
aaacaccucagcu

SEQ ID NO: 40009 - RNA, 14 nt, Homo sapiens
aaacaccucagcug

SEQ ID NO: 40010 - RNA, 14 nt, Homo sapiens
aaacagaccggggu

SEQ ID NO: 40011 - RNA, 14 nt, Homo sapiens
aaacaguagugaua

SEQ ID NO: 40012 - RNA, 22 nt, Homo sapiens
aaacaucaguuacucugaaggg

SEQ ID NO: 40013 - RNA, 23 nt, Homo sapiens
aaacauccagauacacccaaagu

SEQ ID NO: 40014 - RNA, 23 nt, Homo sapiens
aaacaugcuacacacugcauguu

SEQ ID NO: 40015 - RNA, 24 nt, Homo sapiens
aaacaugcuacacacugcauguuu

SEQ ID NO: 40016 - RNA, 21 nt, Homo sapiens
aaacauugguucuuguauuaa

SEQ ID NO: 40017 - RNA, 14 nt, Homo sapiens
aaaccaaggcuaga

SEQ ID NO: 40018 - RNA, 18 nt, Homo sapiens
aaaccacuuuuugcagcu

SEQ ID NO: 40019 - RNA, 14 nt, Homo sapiens
aaaccuauguuugc

SEQ ID NO: 40020 - RNA, 24 nt, Homo sapiens
aaacguauucaaacaauuugaaua

SEQ ID NO: 40021 - RNA, 14 nt, Homo sapiens
aaacguauugcauu

SEQ ID NO: 40022 - RNA, 17 nt, Homo sapiens
aaacguauugcauuuaa

SEQ ID NO: 40023 - RNA, 12 nt, Homo sapiens
aaacgugauuuu

SEQ ID NO: 40024 - RNA, 23 nt, Homo sapiens
aaacgugauuuuuaaauuaaaua

SEQ ID NO: 40025 - RNA, 18 nt, Homo sapiens
aaacuaggugcugcagcc

SEQ ID NO: 40026 - RNA, 12 nt, Homo sapiens
aaacucauccau

SEQ ID NO: 40027 - RNA, 21 nt, Homo sapiens
aaacugagaugugaacacauc

SEQ ID NO: 40028 - RNA, 22 nt, Homo sapiens
aaacugagaugugaacacauca

SEQ ID NO: 40029 - RNA, 23 nt, Homo sapiens
aaacugauacccuuugaaaaagu

SEQ ID NO: 40030 - RNA, 20 nt, Homo sapiens
aaacuuauccuccaugaaua

SEQ ID NO: 40031 - RNA, 16 nt, Homo sapiens
aaacuuugauuuuaua

SEQ ID NO: 40032 - RNA, 23 nt, Homo sapiens
aaacuuugauuuuauaugcuauu

SEQ ID NO: 40033 - RNA, 24 nt, Homo sapiens
aaacuuugauuuuauaugcuauuu

SEQ ID NO: 40034 - RNA, 15 nt, Homo sapiens
aaacuuuuccaauga

SEQ ID NO: 40035 - RNA, 20 nt, Homo sapiens
aaacuuuuccaaugacauuu

SEQ ID NO: 40036 - RNA, 14 nt, Homo sapiens
aaacuuuuggaagg

SEQ ID NO: 40037 - RNA, 11 nt, Homo sapiens
aaagaacagga

SEQ ID NO: 40038 - RNA, 12 nt, Homo sapiens
aaagaacaggaa

SEQ ID NO: 40039 - RNA, 15 nt, Homo sapiens
aaagaagagccggag

SEQ ID NO: 40040 - RNA, 20 nt, Homo sapiens
aaagauuucuugaguuuugu

SEQ ID NO: 40041 - RNA, 16 nt, Homo sapiens
aaagcagaacagugau

SEQ ID NO: 40042 - RNA, 17 nt, Homo sapiens
aaagcagggacuugaac

SEQ ID NO: 40043 - RNA, 19 nt, Homo sapiens
aaagcagggacuugaaccc

SEQ ID NO: 40044 - RNA, 23 nt, Homo sapiens
aaagcagggacuugaacccauau

SEQ ID NO: 40045 - RNA, 12 nt, Homo sapiens
aaagccaaaaac

SEQ ID NO: 40046 - RNA, 17 nt, Homo sapiens
aaagccaaaaaccaaau

SEQ ID NO: 40047 - RNA, 16 nt, Homo sapiens
aaagccuguguuacug

SEQ ID NO: 40048 - RNA, 17 nt, Homo sapiens
aaagcuaaaguaucugu

SEQ ID NO: 40049 - RNA, 15 nt, Homo sapiens
aaagcugaguguuuc

SEQ ID NO: 40050 - RNA, 16 nt, Homo sapiens
aaagcugaguguuuca

SEQ ID NO: 40051 - RNA, 17 nt, Homo sapiens
aaagcugaguguuucac

SEQ ID NO: 40052 - RNA, 14 nt, Homo sapiens
aaagcuuugugcag

SEQ ID NO: 40053 - RNA, 20 nt, Homo sapiens
aaagcuuugugcagauucuu

SEQ ID NO: 40054 - RNA, 22 nt, Homo sapiens
aaaggccugucccugcagacau

SEQ ID NO: 40055 - RNA, 16 nt, Homo sapiens
aaagggcuguuauaau

SEQ ID NO: 40056 - RNA, 22 nt, Homo sapiens
aaagguauuuauugagcaccug

SEQ ID NO: 40057 - RNA, 23 nt, Homo sapiens
aaagguauuuauugagcaccugc

SEQ ID NO: 40058 - RNA, 14 nt, Homo sapiens
aaagguccuggcaa

SEQ ID NO: 40059 - RNA, 14 nt, Homo sapiens
aaaguaaaggcaaa

SEQ ID NO: 40060 - RNA, 17 nt, Homo sapiens
aaaguagauuaagagau

SEQ ID NO: 40061 - RNA, 20 nt, Homo sapiens
aaaguaugugcauauuuuau

SEQ ID NO: 40062 - RNA, 21 nt, Homo sapiens
aaaguaugugcauauuuuauu

SEQ ID NO: 40063 - RNA, 20 nt, Homo sapiens
aaaguauguuagugcaaauu

SEQ ID NO: 40064 - RNA, 19 nt, Homo sapiens
aaagucagugcccaacugu

SEQ ID NO: 40065 - RNA, 11 nt, Homo sapiens
aaagucccaga

SEQ ID NO: 40066 - RNA, 15 nt, Homo sapiens
aaagucccagaucaa

SEQ ID NO: 40067 - RNA, 22 nt, Homo sapiens
aaagucccagaucaagccugcc

SEQ ID NO: 40068 - RNA, 11 nt, Homo sapiens
aaagugcuggg

SEQ ID NO: 40069 - RNA, 12 nt, Homo sapiens
aaagugcuggga

SEQ ID NO: 40070 - RNA, 12 nt, Homo sapiens
aaaguguauuuu

SEQ ID NO: 40071 - RNA, 13 nt, Homo sapiens
aaaguucuaguga

SEQ ID NO: 40072 - RNA, 16 nt, Homo sapiens
aaaguucuagugaccg

SEQ ID NO: 40073 - RNA, 14 nt, Homo sapiens
aaaguucugcagau

SEQ ID NO: 40074 - RNA, 17 nt, Homo sapiens
aaaguucugcagauaaa

SEQ ID NO: 40075 - RNA, 14 nt, Homo sapiens
aaauaaaagcacuu

SEQ ID NO: 40076 - RNA, 19 nt, Homo sapiens
aaauaaaauuuuuauguaa

SEQ ID NO: 40077 - RNA, 21 nt, Homo sapiens
aaauaauuuuuauauuugaaa

SEQ ID NO: 40078 - RNA, 19 nt, Homo sapiens
aaauacacacucaaaucaa

SEQ ID NO: 40079 - RNA, 14 nt, Homo sapiens
aaauacauacuaua

SEQ ID NO: 40080 - RNA, 22 nt, Homo sapiens
aaauacuguuugagguuuuuaa

SEQ ID NO: 40081 - RNA, 15 nt, Homo sapiens
aaauagcuaagauau

SEQ ID NO: 40082 - RNA, 17 nt, Homo sapiens
aaauagugucugaugaa

SEQ ID NO: 40083 - RNA, 10 nt, Homo sapiens
aaauauaaag

SEQ ID NO: 40084 - RNA, 15 nt, Homo sapiens
aaauauaauaugcac

SEQ ID NO: 40085 - RNA, 24 nt, Homo sapiens
aaauauugacuuuuuauggcacua

SEQ ID NO: 40086 - RNA, 15 nt, Homo sapiens
aaauauuuguaucac

SEQ ID NO: 40087 - RNA, 18 nt, Homo sapiens
aaauauuuuuaugugcaa

SEQ ID NO: 40088 - RNA, 17 nt, Homo sapiens
aaaucaaauuccagaau

SEQ ID NO: 40089 - RNA, 14 nt, Homo sapiens
aaaucauuucugca

SEQ ID NO: 40090 - RNA, 15 nt, Homo sapiens
aaauccauacauuug

SEQ ID NO: 40091 - RNA, 23 nt, Homo sapiens
aaaucggaucuggggcucuggga

SEQ ID NO: 40092 - RNA, 18 nt, Homo sapiens
aaaucuacacuccaguga

SEQ ID NO: 40093 - RNA, 14 nt, Homo sapiens
aaaugagcaaaagu

SEQ ID NO: 40094 - RNA, 19 nt, Homo sapiens
aaaugauuucacagugugu

SEQ ID NO: 40095 - RNA, 16 nt, Homo sapiens
aaauggaaaguaacuc

SEQ ID NO: 40096 - RNA, 18 nt, Homo sapiens
aaauggaauacucuuaua

SEQ ID NO: 40097 - RNA, 14 nt, Homo sapiens
aaauggagacacca

SEQ ID NO: 40098 - RNA, 16 nt, Homo sapiens
aaauggccaaugagau

SEQ ID NO: 40099 - RNA, 17 nt, Homo sapiens
aaaugggggugcauuug

SEQ ID NO: 40100 - RNA, 21 nt, Homo sapiens
aaaugguuaaaagagguuuuu

SEQ ID NO: 40101 - RNA, 17 nt, Homo sapiens
aaauguauucuuuuagu

SEQ ID NO: 40102 - RNA, 14 nt, Homo sapiens
aaaugugccuucau

SEQ ID NO: 40103 - RNA, 22 nt, Homo sapiens
aaauguucuccagucauuaugu

SEQ ID NO: 40104 - RNA, 23 nt, Homo sapiens
aaauguucuccagucauuauguu

SEQ ID NO: 40105 - RNA, 22 nt, Homo sapiens
aaauguugacaugggacauuug

SEQ ID NO: 40106 - RNA, 19 nt, Homo sapiens
aaauguuguuuuaggaaua

SEQ ID NO: 40107 - RNA, 18 nt, Homo sapiens
aaauuaaauaaaauuuuu

SEQ ID NO: 40108 - RNA, 18 nt, Homo sapiens
aaauuauauuuugaacaa

SEQ ID NO: 40109 - RNA, 17 nt, Homo sapiens
aaauucacaaguugugu

SEQ ID NO: 40110 - RNA, 19 nt, Homo sapiens
aaauucccuggccuuucau

SEQ ID NO: 40111 - RNA, 16 nt, Homo sapiens
aacacuaaaaaggcau

SEQ ID NO: 40112 - RNA, 21 nt, Homo sapiens
aacacuaaaaaggcauguaau

SEQ ID NO: 40113 - RNA, 14 nt, Homo sapiens
aacagaacuaugga

SEQ ID NO: 40114 - RNA, 16 nt, Homo sapiens
aacagaagcuuccauu

SEQ ID NO: 40115 - RNA, 15 nt, Homo sapiens
aacaguauccaguac

SEQ ID NO: 40116 - RNA, 17 nt, Homo sapiens
aacauagcaucucagga

SEQ ID NO: 40117 - RNA, 19 nt, Homo sapiens
aacaucaguuacucugaag

SEQ ID NO: 40118 - RNA, 18 nt, Homo sapiens
aacaugagccuuuguugc

SEQ ID NO: 40119 - RNA, 19 nt, Homo sapiens
aacaugccagccacuguga

SEQ ID NO: 40120 - RNA, 14 nt, Homo sapiens
aacauguauguaaa

SEQ ID NO: 40121 - RNA, 13 nt, Homo sapiens
aacauuucucaug

SEQ ID NO: 40122 - RNA, 23 nt, Homo sapiens
aaccaaauuuguauuuaagguau

SEQ ID NO: 40123 - RNA, 12 nt, Homo sapiens
aaccagccuggu

SEQ ID NO: 40124 - RNA, 13 nt, Homo sapiens
aaccagccugguc

SEQ ID NO: 40125 - RNA, 15 nt, Homo sapiens
aaccagccuggucaa

SEQ ID NO: 40126 - RNA, 11 nt, Homo sapiens
aacccaaagug

SEQ ID NO: 40127 - RNA, 19 nt, Homo sapiens
aacccaaagugugacucau

SEQ ID NO: 40128 - RNA, 14 nt, Homo sapiens
aacccagggaagac

SEQ ID NO: 40129 - RNA, 17 nt, Homo sapiens
aacccagggaagacaag

SEQ ID NO: 40130 - RNA, 20 nt, Homo sapiens
aaccguuugugauugccauu

SEQ ID NO: 40131 - RNA, 21 nt, Homo sapiens
aaccucauuccccaaccacuu

SEQ ID NO: 40132 - RNA, 20 nt, Homo sapiens
aaccuccaccuucuggguuc

SEQ ID NO: 40133 - RNA, 20 nt, Homo sapiens
aaccucugugagcaucacag

SEQ ID NO: 40134 - RNA, 11 nt, Homo sapiens
aaccugagccc

SEQ ID NO: 40135 - RNA, 13 nt, Homo sapiens
aaccugagcccca

SEQ ID NO: 40136 - RNA, 15 nt, Homo sapiens
aaccugucccagcga

SEQ ID NO: 40137 - RNA, 24 nt, Homo sapiens
aacguauugcauuuaauuuauuga

SEQ ID NO: 40138 - RNA, 14 nt, Homo sapiens
aacuaaacuuucac

SEQ ID NO: 40139 - RNA, 17 nt, Homo sapiens
aacuagaauuuauucaa

SEQ ID NO: 40140 - RNA, 20 nt, Homo sapiens
aacuaucucauuuccaagca

SEQ ID NO: 40141 - RNA, 14 nt, Homo sapiens
aacucaaauacgug

SEQ ID NO: 40142 - RNA, 17 nt, Homo sapiens
aacucagaaacaucagu

SEQ ID NO: 40143 - RNA, 15 nt, Homo sapiens
aacucauauuuucau

SEQ ID NO: 40144 - RNA, 18 nt, Homo sapiens
aacucauugcaaccucca

SEQ ID NO: 40145 - RNA, 15 nt, Homo sapiens
aacuccagaaaguga

SEQ ID NO: 40146 - RNA, 16 nt, Homo sapiens
aacucuaccugcacac

SEQ ID NO: 40147 - RNA, 19 nt, Homo sapiens
aacugacucuuaagaagac

SEQ ID NO: 40148 - RNA, 13 nt, Homo sapiens
aacugauguaagu

SEQ ID NO: 40149 - RNA, 14 nt, Homo sapiens
aacugcacugucaa

SEQ ID NO: 40150 - RNA, 23 nt, Homo sapiens
aacugcagcgaguacuucccgcu

SEQ ID NO: 40151 - RNA, 12 nt, Homo sapiens
aacugccagcaa

SEQ ID NO: 40152 - RNA, 20 nt, Homo sapiens
aacugccaucauuuacuuuu

SEQ ID NO: 40153 - RNA, 17 nt, Homo sapiens
aacuggauuaaacuuaa

SEQ ID NO: 40154 - RNA, 14 nt, Homo sapiens
aacuggcaguuuuc

SEQ ID NO: 40155 - RNA, 17 nt, Homo sapiens
aacuggcaguuuuccau

SEQ ID NO: 40156 - RNA, 12 nt, Homo sapiens
aacugugacugu

SEQ ID NO: 40157 - RNA, 22 nt, Homo sapiens
aacuguuauuuauaaucacuuu

SEQ ID NO: 40158 - RNA, 19 nt, Homo sapiens
aacuguuuagaugaauguc

SEQ ID NO: 40159 - RNA, 16 nt, Homo sapiens
aacuuacuuaguguua

SEQ ID NO: 40160 - RNA, 15 nt, Homo sapiens
aacuuauuuguacau

SEQ ID NO: 40161 - RNA, 16 nt, Homo sapiens
aacuuauuuguacauu

SEQ ID NO: 40162 - RNA, 14 nt, Homo sapiens
aacuucagcgguuu

SEQ ID NO: 40163 - RNA, 22 nt, Homo sapiens
aacuuccuuggacucauuuuaa

SEQ ID NO: 40164 - RNA, 16 nt, Homo sapiens
aacuuucacaccccag

SEQ ID NO: 40165 - RNA, 22 nt, Homo sapiens
aacuuuuauaaacuuuaccuuu

SEQ ID NO: 40166 - RNA, 20 nt, Homo sapiens
aacuuuuccaaugacauuuu

SEQ ID NO: 40167 - RNA, 18 nt, Homo sapiens
aacuuuuuguuuuguuuc

SEQ ID NO: 40168 - RNA, 18 nt, Homo sapiens
aagaaaggccagcaaauu

SEQ ID NO: 40169 - RNA, 13 nt, Homo sapiens
aagaaauauuccu

SEQ ID NO: 40170 - RNA, 13 nt, Homo sapiens
aagaaauucugca

SEQ ID NO: 40171 - RNA, 16 nt, Homo sapiens
aagaacuuauuuguac

SEQ ID NO: 40172 - RNA, 13 nt, Homo sapiens
aagaagacugcau

SEQ ID NO: 40173 - RNA, 15 nt, Homo sapiens
aagaagagccggagc

SEQ ID NO: 40174 - RNA, 14 nt, Homo sapiens
aagaaguugauaug

SEQ ID NO: 40175 - RNA, 16 nt, Homo sapiens
aagaaugacuaugcaa

SEQ ID NO: 40176 - RNA, 14 nt, Homo sapiens
aagacaaaaagcua

SEQ ID NO: 40177 - RNA, 20 nt, Homo sapiens
aagaccuggucgucgucuug

SEQ ID NO: 40178 - RNA, 20 nt, Homo sapiens
aagacuauucaaacagucuc

SEQ ID NO: 40179 - RNA, 13 nt, Homo sapiens
aagacuccaaaga

SEQ ID NO: 40180 - RNA, 11 nt, Homo sapiens
aagacugacca

SEQ ID NO: 40181 - RNA, 22 nt, Homo sapiens
aagagaacaagcaaauauaaac

SEQ ID NO: 40182 - RNA, 18 nt, Homo sapiens
aagagagacacagcugca

SEQ ID NO: 40183 - RNA, 15 nt, Homo sapiens
aagagauggguuuga

SEQ ID NO: 40184 - RNA, 12 nt, Homo sapiens
aagagccggagc

SEQ ID NO: 40185 - RNA, 18 nt, Homo sapiens
aagagccggagccuccag

SEQ ID NO: 40186 - RNA, 22 nt, Homo sapiens
aagagccggagccuccagcugc

SEQ ID NO: 40187 - RNA, 23 nt, Homo sapiens
aagagccggagccuccagcugcc

SEQ ID NO: 40188 - RNA, 16 nt, Homo sapiens
aagaggcagcuugaaa

SEQ ID NO: 40189 - RNA, 17 nt, Homo sapiens
aagagguuuuaaagcuu

SEQ ID NO: 40190 - RNA, 14 nt, Homo sapiens
aagaguggguuuca

SEQ ID NO: 40191 - RNA, 22 nt, Homo sapiens
aagaguggguuucacaagugaa

SEQ ID NO: 40192 - RNA, 16 nt, Homo sapiens
aagaguuccuucugcu

SEQ ID NO: 40193 - RNA, 17 nt, Homo sapiens
aagauacugaaauaaac

SEQ ID NO: 40194 - RNA, 18 nt, Homo sapiens
aagaucugcaacuacuau

SEQ ID NO: 40195 - RNA, 22 nt, Homo sapiens
aagaucuuuuuccagguuccug

SEQ ID NO: 40196 - RNA, 11 nt, Homo sapiens
aagaugaaaau

SEQ ID NO: 40197 - RNA, 17 nt, Homo sapiens
aagaugagugagcaugc

SEQ ID NO: 40198 - RNA, 16 nt, Homo sapiens
aagaugaugaugaucu

SEQ ID NO: 40199 - RNA, 22 nt, Homo sapiens
aagaugugggcagugaugucac

SEQ ID NO: 40200 - RNA, 15 nt, Homo sapiens
aagauuaugaucuca

SEQ ID NO: 40201 - RNA, 23 nt, Homo sapiens
aagauucaaugccccugaauuua

SEQ ID NO: 40202 - RNA, 16 nt, Homo sapiens
aagauucuauguuaau

SEQ ID NO: 40203 - RNA, 14 nt, Homo sapiens
aagauuuaccacuu

SEQ ID NO: 40204 - RNA, 12 nt, Homo sapiens
aagcaaauauaa

SEQ ID NO: 40205 - RNA, 14 nt, Homo sapiens
aagcaaauggccaa

SEQ ID NO: 40206 - RNA, 13 nt, Homo sapiens
aagcaacaucuag

SEQ ID NO: 40207 - RNA, 20 nt, Homo sapiens
aagcaacaucuagcaaaugu

SEQ ID NO: 40208 - RNA, 18 nt, Homo sapiens
aagcaacccaaauguuca

SEQ ID NO: 40209 - RNA, 14 nt, Homo sapiens
aagcaaguauuaga

SEQ ID NO: 40210 - RNA, 20 nt, Homo sapiens
aagcacagugaucaaguuau

SEQ ID NO: 40211 - RNA, 21 nt, Homo sapiens
aagcacuuuaacacagugucu

SEQ ID NO: 40212 - RNA, 21 nt, Homo sapiens
aagcacuuucccucuuggugc

SEQ ID NO: 40213 - RNA, 20 nt, Homo sapiens
aagcagaacagugauuacca

SEQ ID NO: 40214 - RNA, 17 nt, Homo sapiens
aagcaugggccuagccc

SEQ ID NO: 40215 - RNA, 11 nt, Homo sapiens
aagcauuguaa

SEQ ID NO: 40216 - RNA, 14 nt, Homo sapiens
aagccagacaucaa

SEQ ID NO: 40217 - RNA, 18 nt, Homo sapiens
aagccaucggagcugcua

SEQ ID NO: 40218 - RNA, 20 nt, Homo sapiens
aagccaucggagcugcuaga

SEQ ID NO: 40219 - RNA, 15 nt, Homo sapiens
aagcccaauauuaua

SEQ ID NO: 40220 - RNA, 14 nt, Homo sapiens
aagccucaugucca

SEQ ID NO: 40221 - RNA, 16 nt, Homo sapiens
aagccucuauugccau

SEQ ID NO: 40222 - RNA, 15 nt, Homo sapiens
aagccuguguuacug

SEQ ID NO: 40223 - RNA, 19 nt, Homo sapiens
aagccuuggggcugaugca

SEQ ID NO: 40224 - RNA, 19 nt, Homo sapiens
aagcuguuuccauagggug

SEQ ID NO: 40225 - RNA, 22 nt, Homo sapiens
aagcuuccauuccaagccugac

SEQ ID NO: 40226 - RNA, 21 nt, Homo sapiens
aaggaaacuggguuccugcaa

SEQ ID NO: 40227 - RNA, 23 nt, Homo sapiens
aaggaaacuggguuccugcaaug

SEQ ID NO: 40228 - RNA, 23 nt, Homo sapiens
aaggaagaaauuccaggaaaauc

SEQ ID NO: 40229 - RNA, 13 nt, Homo sapiens
aaggaagguucug

SEQ ID NO: 40230 - RNA, 23 nt, Homo sapiens
aaggaagguucuggugugaacua

SEQ ID NO: 40231 - RNA, 23 nt, Homo sapiens
aaggaccauaaauuuaaauggag

SEQ ID NO: 40232 - RNA, 15 nt, Homo sapiens
aaggagcucccagga

SEQ ID NO: 40233 - RNA, 19 nt, Homo sapiens
aaggauuuuaugcuuuaaa

SEQ ID NO: 40234 - RNA, 19 nt, Homo sapiens
aaggcagcucuaaauguca

SEQ ID NO: 40235 - RNA, 20 nt, Homo sapiens
aaggcauauuuaacaaaauu

SEQ ID NO: 40236 - RNA, 16 nt, Homo sapiens
aaggccagcaaauucg

SEQ ID NO: 40237 - RNA, 20 nt, Homo sapiens
aaggcccccgggccgacgga

SEQ ID NO: 40238 - RNA, 20 nt, Homo sapiens
aaggcuaccuuuguauucuc

SEQ ID NO: 40239 - RNA, 15 nt, Homo sapiens
aaggcuccugagaca

SEQ ID NO: 40240 - RNA, 22 nt, Homo sapiens
aaggcuccugagacacaugggu

SEQ ID NO: 40241 - RNA, 12 nt, Homo sapiens
aaggcuggagug

SEQ ID NO: 40242 - RNA, 13 nt, Homo sapiens
aaggcuggagugc

SEQ ID NO: 40243 - RNA, 15 nt, Homo sapiens
aaggcuggagugcag

SEQ ID NO: 40244 - RNA, 20 nt, Homo sapiens
aaggcuuagacccucaugcu

SEQ ID NO: 40245 - RNA, 23 nt, Homo sapiens
aaggcuuagacccucaugcugcc

SEQ ID NO: 40246 - RNA, 23 nt, Homo sapiens
aaggcuucucuuaaacacuaaaa

SEQ ID NO: 40247 - RNA, 23 nt, Homo sapiens
aagggaacugaacauuccagagc

SEQ ID NO: 40248 - RNA, 14 nt, Homo sapiens
aaggggcggcggcc

SEQ ID NO: 40249 - RNA, 22 nt, Homo sapiens
aaggggcggcggcccugugcgg

SEQ ID NO: 40250 - RNA, 14 nt, Homo sapiens
aaggguaauuauau

SEQ ID NO: 40251 - RNA, 21 nt, Homo sapiens
aagggucucccucuguugcca

SEQ ID NO: 40252 - RNA, 20 nt, Homo sapiens
aagguaaaauugaaaggcau

SEQ ID NO: 40253 - RNA, 18 nt, Homo sapiens
aagguauuuauugagcac

SEQ ID NO: 40254 - RNA, 19 nt, Homo sapiens
aagguauuuuaaucaccaa

SEQ ID NO: 40255 - RNA, 19 nt, Homo sapiens
aagguuaugauugaaucua

SEQ ID NO: 40256 - RNA, 20 nt, Homo sapiens
aagguuaugauugaaucuac

SEQ ID NO: 40257 - RNA, 12 nt, Homo sapiens
aaguaaaaccac

SEQ ID NO: 40258 - RNA, 13 nt, Homo sapiens
aaguaaaaccaca

SEQ ID NO: 40259 - RNA, 15 nt, Homo sapiens
aaguaaaaccacagc

SEQ ID NO: 40260 - RNA, 12 nt, Homo sapiens
aaguaauuucag

SEQ ID NO: 40261 - RNA, 13 nt, Homo sapiens
aaguacagacuuu

SEQ ID NO: 40262 - RNA, 12 nt, Homo sapiens
aaguacucauac

SEQ ID NO: 40263 - RNA, 14 nt, Homo sapiens
aaguagggacuucu

SEQ ID NO: 40264 - RNA, 18 nt, Homo sapiens
aaguagggacuucugucu

SEQ ID NO: 40265 - RNA, 17 nt, Homo sapiens
aaguaucccuacuguaa

SEQ ID NO: 40266 - RNA, 19 nt, Homo sapiens
aaguaucccuacuguaauu

SEQ ID NO: 40267 - RNA, 19 nt, Homo sapiens
aaguauccuucagccugaa

SEQ ID NO: 40268 - RNA, 13 nt, Homo sapiens
aaguauuuuauua

SEQ ID NO: 40269 - RNA, 15 nt, Homo sapiens
aaguccaagcauuua

SEQ ID NO: 40270 - RNA, 14 nt, Homo sapiens
aagucccugcugcc

SEQ ID NO: 40271 - RNA, 11 nt, Homo sapiens
aagucuguuuu

SEQ ID NO: 40272 - RNA, 21 nt, Homo sapiens
aagucuguuuuaugacuucau

SEQ ID NO: 40273 - RNA, 11 nt, Homo sapiens
aagucuuccau

SEQ ID NO: 40274 - RNA, 23 nt, Homo sapiens
aagucuuccauagagacuuugug

SEQ ID NO: 40275 - RNA, 16 nt, Homo sapiens
aagugaaaaacaucca

SEQ ID NO: 40276 - RNA, 17 nt, Homo sapiens
aagugaaaaacauccag

SEQ ID NO: 40277 - RNA, 16 nt, Homo sapiens
aagugaaauaagccag

SEQ ID NO: 40278 - RNA, 17 nt, Homo sapiens
aagugaaauaagccaga

SEQ ID NO: 40279 - RNA, 15 nt, Homo sapiens
aagugcugggaauua

SEQ ID NO: 40280 - RNA, 22 nt, Homo sapiens
aagugguauagaaaugcugguu

SEQ ID NO: 40281 - RNA, 16 nt, Homo sapiens
aaguuauuuuuaauuu

SEQ ID NO: 40282 - RNA, 11 nt, Homo sapiens
aaguucugcag

SEQ ID NO: 40283 - RNA, 16 nt, Homo sapiens
aaguuuaauugacuua

SEQ ID NO: 40284 - RNA, 12 nt, Homo sapiens
aaguuuaugcau

SEQ ID NO: 40285 - RNA, 18 nt, Homo sapiens
aaguuuaugcauacagua

SEQ ID NO: 40286 - RNA, 19 nt, Homo sapiens
aaguuuaugcauacaguaa

SEQ ID NO: 40287 - RNA, 23 nt, Homo sapiens
aaguuuuuauggcuuuugugcau

SEQ ID NO: 40288 - RNA, 16 nt, Homo sapiens
aauaaaaaauguaagu

SEQ ID NO: 40289 - RNA, 16 nt, Homo sapiens
aauaaaaaggugacca

SEQ ID NO: 40290 - RNA, 12 nt, Homo sapiens
aauaaaccuaug

SEQ ID NO: 40291 - RNA, 16 nt, Homo sapiens
aauaaaugugccuuca

SEQ ID NO: 40292 - RNA, 22 nt, Homo sapiens
aauaaauucccuggccuuucau

SEQ ID NO: 40293 - RNA, 16 nt, Homo sapiens
aauaauacaccagaga

SEQ ID NO: 40294 - RNA, 22 nt, Homo sapiens
aauaauuuuuauauuugaaaua

SEQ ID NO: 40295 - RNA, 18 nt, Homo sapiens
aauacaccacuacauucu

SEQ ID NO: 40296 - RNA, 20 nt, Homo sapiens
aauacauaaaguaugugcau

SEQ ID NO: 40297 - RNA, 17 nt, Homo sapiens
aauagaaauaaaccuau

SEQ ID NO: 40298 - RNA, 18 nt, Homo sapiens
aauagaaauaaaccuaug

SEQ ID NO: 40299 - RNA, 22 nt, Homo sapiens
aauagaaggauguacauuucca

SEQ ID NO: 40300 - RNA, 15 nt, Homo sapiens
aauagugucugauga

SEQ ID NO: 40301 - RNA, 16 nt, Homo sapiens
aauagugucugaugaa

SEQ ID NO: 40302 - RNA, 17 nt, Homo sapiens
aauaguucaaagccaag

SEQ ID NO: 40303 - RNA, 15 nt, Homo sapiens
aauauauaaccagug

SEQ ID NO: 40304 - RNA, 14 nt, Homo sapiens
aauauauauuuuag

SEQ ID NO: 40305 - RNA, 12 nt, Homo sapiens
aauauauuuccu

SEQ ID NO: 40306 - RNA, 18 nt, Homo sapiens
aauauauuuccuuauuca

SEQ ID NO: 40307 - RNA, 19 nt, Homo sapiens
aauauauuuuuagacucau

SEQ ID NO: 40308 - RNA, 17 nt, Homo sapiens
aauaucaguuauuuuua

SEQ ID NO: 40309 - RNA, 18 nt, Homo sapiens
aauaucaguuauuuuuaa

SEQ ID NO: 40310 - RNA, 22 nt, Homo sapiens
aauaucccuuggacauuuuaug

SEQ ID NO: 40311 - RNA, 23 nt, Homo sapiens
aauaucccuuggacauuuuaugu

SEQ ID NO: 40312 - RNA, 15 nt, Homo sapiens
aauaucuuaucuucc

SEQ ID NO: 40313 - RNA, 21 nt, Homo sapiens
aauaugccccauucaacaucu

SEQ ID NO: 40314 - RNA, 23 nt, Homo sapiens
aauauguaaauagaaacguguau

SEQ ID NO: 40315 - RNA, 14 nt, Homo sapiens
aauauuauguuaaa

SEQ ID NO: 40316 - RNA, 17 nt, Homo sapiens
aauauuauguuaaaacu

SEQ ID NO: 40317 - RNA, 17 nt, Homo sapiens
aauauuuauuaccucug

SEQ ID NO: 40318 - RNA, 20 nt, Homo sapiens
aauauuuauuaccucugaua

SEQ ID NO: 40319 - RNA, 20 nt, Homo sapiens
aauauuuauuauuuucaccu

SEQ ID NO: 40320 - RNA, 21 nt, Homo sapiens
aauauuuauuuuaauaauguu

SEQ ID NO: 40321 - RNA, 18 nt, Homo sapiens
aauauuugcaagacauag

SEQ ID NO: 40322 - RNA, 19 nt, Homo sapiens
aaucaaauuccagaaugau

SEQ ID NO: 40323 - RNA, 19 nt, Homo sapiens
aaucaccaaggcugauuaa

SEQ ID NO: 40324 - RNA, 18 nt, Homo sapiens
aaucacuggcuguuaauc

SEQ ID NO: 40325 - RNA, 23 nt, Homo sapiens
aaucacuggcuguuaaucuuuca

SEQ ID NO: 40326 - RNA, 14 nt, Homo sapiens
aaucagaucauuuc

SEQ ID NO: 40327 - RNA, 11 nt, Homo sapiens
aaucaggguua

SEQ ID NO: 40328 - RNA, 12 nt, Homo sapiens
aaucaugaauua

SEQ ID NO: 40329 - RNA, 22 nt, Homo sapiens
aaucaugaauuaguuuuauaug

SEQ ID NO: 40330 - RNA, 16 nt, Homo sapiens
aaucauuucugcauca

SEQ ID NO: 40331 - RNA, 20 nt, Homo sapiens
aaucauuucugcaucagcug

SEQ ID NO: 40332 - RNA, 23 nt, Homo sapiens
aauccaagaaaauggccagugag

SEQ ID NO: 40333 - RNA, 21 nt, Homo sapiens
aauccaagaacuuauuuguac

SEQ ID NO: 40334 - RNA, 15 nt, Homo sapiens
aaucccagcuacuug

SEQ ID NO: 40335 - RNA, 21 nt, Homo sapiens
aauccucucaaccaccuuuca

SEQ ID NO: 40336 - RNA, 18 nt, Homo sapiens
aauccugauucauauuua

SEQ ID NO: 40337 - RNA, 15 nt, Homo sapiens
aauccuugaagauuu

SEQ ID NO: 40338 - RNA, 19 nt, Homo sapiens
aauccuuuguuuucugacu

SEQ ID NO: 40339 - RNA, 13 nt, Homo sapiens
aaucuaaauggaa

SEQ ID NO: 40340 - RNA, 16 nt, Homo sapiens
aaucuacugucaauuu

SEQ ID NO: 40341 - RNA, 12 nt, Homo sapiens
aaucucaaauuu

SEQ ID NO: 40342 - RNA, 13 nt, Homo sapiens
aaucuccaaaaua

SEQ ID NO: 40343 - RNA, 13 nt, Homo sapiens
aaucugagccagu

SEQ ID NO: 40344 - RNA, 20 nt, Homo sapiens
aaucugagccagugcuuuaa

SEQ ID NO: 40345 - RNA, 23 nt, Homo sapiens
aaucugagccagugcuuuaaugg

SEQ ID NO: 40346 - RNA, 22 nt, Homo sapiens
aaucugaggccuccucucucag

SEQ ID NO: 40347 - RNA, 17 nt, Homo sapiens
aaucuucagaccuagaa

SEQ ID NO: 40348 - RNA, 22 nt, Homo sapiens
aaucuuuauaguucuacuccau

SEQ ID NO: 40349 - RNA, 20 nt, Homo sapiens
aaucuuucaaagugucuuga

SEQ ID NO: 40350 - RNA, 13 nt, Homo sapiens
aaugaaguguuua

SEQ ID NO: 40351 - RNA, 15 nt, Homo sapiens
aaugaaugaaugaau

SEQ ID NO: 40352 - RNA, 17 nt, Homo sapiens
aaugaaugaauggcuaa

SEQ ID NO: 40353 - RNA, 16 nt, Homo sapiens
aaugacauuuuguugg

SEQ ID NO: 40354 - RNA, 17 nt, Homo sapiens
aaugacccccaucccau

SEQ ID NO: 40355 - RNA, 19 nt, Homo sapiens
aaugacuaaaaaacaaaga

SEQ ID NO: 40356 - RNA, 22 nt, Homo sapiens
aaugagagacacacugaagaag

SEQ ID NO: 40357 - RNA, 16 nt, Homo sapiens
aaugagaucauuguga

SEQ ID NO: 40358 - RNA, 22 nt, Homo sapiens
aaugauaacuggaaacuucagc

SEQ ID NO: 40359 - RNA, 15 nt, Homo sapiens
aaugauuaugaauua

SEQ ID NO: 40360 - RNA, 21 nt, Homo sapiens
aaugauuaugaauuacauuug

SEQ ID NO: 40361 - RNA, 12 nt, Homo sapiens
aaugauuucaca

SEQ ID NO: 40362 - RNA, 15 nt, Homo sapiens
aaugauuucacagug

SEQ ID NO: 40363 - RNA, 23 nt, Homo sapiens
aaugauuucacagugugugguca

SEQ ID NO: 40364 - RNA, 24 nt, Homo sapiens
aaugauuuuacggagauaucccag

SEQ ID NO: 40365 - RNA, 13 nt, Homo sapiens
aaugcaccuggaa

SEQ ID NO: 40366 - RNA, 21 nt, Homo sapiens
aaugcugguuuuucaguuuuc

SEQ ID NO: 40367 - RNA, 15 nt, Homo sapiens
aauggagacaccacc

SEQ ID NO: 40368 - RNA, 21 nt, Homo sapiens
aauggcuaagcaaaaugugau

SEQ ID NO: 40369 - RNA, 15 nt, Homo sapiens
aaugggggugcauuu

SEQ ID NO: 40370 - RNA, 22 nt, Homo sapiens
aaugguuaaaagagguuuuucu

SEQ ID NO: 40371 - RNA, 15 nt, Homo sapiens
aaugguuccauucuc

SEQ ID NO: 40372 - RNA, 20 nt, Homo sapiens
aauguaagggaaacugccag

SEQ ID NO: 40373 - RNA, 22 nt, Homo sapiens
aauguaagggaaacugccagca

SEQ ID NO: 40374 - RNA, 14 nt, Homo sapiens
aauguagauaaagc

SEQ ID NO: 40375 - RNA, 17 nt, Homo sapiens
aauguagcagcucauaa

SEQ ID NO: 40376 - RNA, 14 nt, Homo sapiens
aauguaugugcaca

SEQ ID NO: 40377 - RNA, 15 nt, Homo sapiens
aauguaugugcacau

SEQ ID NO: 40378 - RNA, 12 nt, Homo sapiens
aauguauucuuu

SEQ ID NO: 40379 - RNA, 21 nt, Homo sapiens
aauguauucuuuuaguuuuua

SEQ ID NO: 40380 - RNA, 24 nt, Homo sapiens
aaugugacuuggauucaauuuuaa

SEQ ID NO: 40381 - RNA, 10 nt, Homo sapiens
aaugugcaau

SEQ ID NO: 40382 - RNA, 11 nt, Homo sapiens
aaugugcaaua

SEQ ID NO: 40383 - RNA, 17 nt, Homo sapiens
aauguucuccagucauu

SEQ ID NO: 40384 - RNA, 22 nt, Homo sapiens
aauguuguuuuaggaauacaua

SEQ ID NO: 40385 - RNA, 14 nt, Homo sapiens
aauuaacacaugau

SEQ ID NO: 40386 - RNA, 16 nt, Homo sapiens
aauuaagagagucuau

SEQ ID NO: 40387 - RNA, 18 nt, Homo sapiens
aauuaauggaauauguaa

SEQ ID NO: 40388 - RNA, 13 nt, Homo sapiens
aauuacaggcgug

SEQ ID NO: 40389 - RNA, 21 nt, Homo sapiens
aauuacaggcgugagccacca

SEQ ID NO: 40390 - RNA, 16 nt, Homo sapiens
aauuacauuuguauaa

SEQ ID NO: 40391 - RNA, 17 nt, Homo sapiens
aauuacauuuguauaaa

SEQ ID NO: 40392 - RNA, 13 nt, Homo sapiens
aauuagccgggca

SEQ ID NO: 40393 - RNA, 19 nt, Homo sapiens
aauuagccgggcauggugg

SEQ ID NO: 40394 - RNA, 15 nt, Homo sapiens
aauuauuucacuuua

SEQ ID NO: 40395 - RNA, 12 nt, Homo sapiens
aauuauuugaag

SEQ ID NO: 40396 - RNA, 18 nt, Homo sapiens
aauuauuugaagauuuaa

SEQ ID NO: 40397 - RNA, 19 nt, Homo sapiens
aauuauuuuuacaguucuc

SEQ ID NO: 40398 - RNA, 13 nt, Homo sapiens
aauuccaauacau

SEQ ID NO: 40399 - RNA, 18 nt, Homo sapiens
aauucccuggccuuucau

SEQ ID NO: 40400 - RNA, 20 nt, Homo sapiens
aauuccuauauccugugacu

SEQ ID NO: 40401 - RNA, 22 nt, Homo sapiens
aauuccuauauccugugacugu

SEQ ID NO: 40402 - RNA, 22 nt, Homo sapiens
aauucgcugcaaccuguugaua

SEQ ID NO: 40403 - RNA, 20 nt, Homo sapiens
aauucucuaguuugauuaaa

SEQ ID NO: 40404 - RNA, 17 nt, Homo sapiens
aauucuuacauguuuuc

SEQ ID NO: 40405 - RNA, 17 nt, Homo sapiens
aauugaaaggcauucuc

SEQ ID NO: 40406 - RNA, 21 nt, Homo sapiens
aauugaauucccugccuggau

SEQ ID NO: 40407 - RNA, 14 nt, Homo sapiens
aauugacacuuaaa

SEQ ID NO: 40408 - RNA, 16 nt, Homo sapiens
aauugacccacaagaa

SEQ ID NO: 40409 - RNA, 13 nt, Homo sapiens
aauugcuaucgcc

SEQ ID NO: 40410 - RNA, 17 nt, Homo sapiens
aauugcuaucgccauca

SEQ ID NO: 40411 - RNA, 14 nt, Homo sapiens
aaauugagcuaggg

SEQ ID NO: 40412 - RNA, 12 nt, Homo sapiens
aaauuggacuua

SEQ ID NO: 40413 - RNA, 20 nt, Homo sapiens
aaauugggaaaggaguagaa

SEQ ID NO: 40414 - RNA, 22 nt, Homo sapiens
aaauuugguucuaggccgggcg

SEQ ID NO: 40415 - RNA, 23 nt, Homo sapiens
aaauuugguucuaggccgggcgc

SEQ ID NO: 40416 - RNA, 14 nt, Homo sapiens
aaauuuuauagugu

SEQ ID NO: 40417 - RNA, 15 nt, Homo sapiens
aaauuuuauaguguc

SEQ ID NO: 40418 - RNA, 16 nt, Homo sapiens
aacaaaaaaagcauug

SEQ ID NO: 40419 - RNA, 13 nt, Homo sapiens
aacaaagaagaca

SEQ ID NO: 40420 - RNA, 15 nt, Homo sapiens
aacaacaacaacaaa

SEQ ID NO: 40421 - RNA, 14 nt, Homo sapiens
aacaacucgaauca

SEQ ID NO: 40422 - RNA, 15 nt, Homo sapiens
aacaacucgaaucac

SEQ ID NO: 40423 - RNA, 16 nt, Homo sapiens
aacaacucgaaucacu

SEQ ID NO: 40424 - RNA, 21 nt, Homo sapiens
aacacagugucuggcacuugg

SEQ ID NO: 40425 - RNA, 18 nt, Homo sapiens
aacacaugauccugcaau

SEQ ID NO: 40426 - RNA, 14 nt, Homo sapiens
aacagaagcuucca

SEQ ID NO: 40427 - RNA, 22 nt, Homo sapiens
aacagaccgggguucccgugug

SEQ ID NO: 40428 - RNA, 17 nt, Homo sapiens
aacagcuccaccuuacu

SEQ ID NO: 40429 - RNA, 14 nt, Homo sapiens
aacagucucaggaa

SEQ ID NO: 40430 - RNA, 15 nt, Homo sapiens
aacauagcaucucag

SEQ ID NO: 40431 - RNA, 10 nt, Homo sapiens
aacauagguu

SEQ ID NO: 40432 - RNA, 20 nt, Homo sapiens
aacaugccagccacugugau

SEQ ID NO: 40433 - RNA, 14 nt, Homo sapiens
aacauguucacuua

SEQ ID NO: 40434 - RNA, 16 nt, Homo sapiens
aacauuucaaaaggua

SEQ ID NO: 40435 - RNA, 22 nt, Homo sapiens
aacauuugguaaggggaauuga

SEQ ID NO: 40436 - RNA, 20 nt, Homo sapiens
aaccaaauggagugacuuag

SEQ ID NO: 40437 - RNA, 21 nt, Homo sapiens
aaccaaauggagugacuuagu

SEQ ID NO: 40438 - RNA, 13 nt, Homo sapiens
aaccaccuuucag

SEQ ID NO: 40439 - RNA, 22 nt, Homo sapiens
aaccaccuuucagauaacuguu

SEQ ID NO: 40440 - RNA, 18 nt, Homo sapiens
aaccacuucauucuugaa

SEQ ID NO: 40441 - RNA, 17 nt, Homo sapiens
aaccagagccugagugu

SEQ ID NO: 40442 - RNA, 21 nt, Homo sapiens
aaccagagccugaguguugcc

SEQ ID NO: 40443 - RNA, 14 nt, Homo sapiens
aaccagcagaaaug

SEQ ID NO: 40444 - RNA, 15 nt, Homo sapiens
aaccaugcccaagaa

SEQ ID NO: 40445 - RNA, 23 nt, Homo sapiens
aacccaaagugugacucauuaaa

SEQ ID NO: 40446 - RNA, 15 nt, Homo sapiens
aacccaaauguucau

SEQ ID NO: 40447 - RNA, 22 nt, Homo sapiens
aacccaaauguucaucaaugaa

SEQ ID NO: 40448 - RNA, 20 nt, Homo sapiens
aacccaggagauggaaguug

SEQ ID NO: 40449 - RNA, 15 nt, Homo sapiens
aacccagggaagaca

SEQ ID NO: 40450 - RNA, 15 nt, Homo sapiens
aaccccaucauccuc

SEQ ID NO: 40451 - RNA, 13 nt, Homo sapiens
aacccggccugau

SEQ ID NO: 40452 - RNA, 16 nt, Homo sapiens
aacccggccugauuaa

SEQ ID NO: 40453 - RNA, 22 nt, Homo sapiens
aacccggccugauuaaaguuaa

SEQ ID NO: 40454 - RNA, 12 nt, Homo sapiens
aacccugucucu

SEQ ID NO: 40455 - RNA, 19 nt, Homo sapiens
aaccguuugugauugccau

SEQ ID NO: 40456 - RNA, 15 nt, Homo sapiens
aaccucauuaucagu

SEQ ID NO: 40457 - RNA, 15 nt, Homo sapiens
aaccucauuccccaa

SEQ ID NO: 40458 - RNA, 18 nt, Homo sapiens
aaccucauuccccaacca

SEQ ID NO: 40459 - RNA, 11 nt, Homo sapiens
aaccuccaccu

SEQ ID NO: 40460 - RNA, 19 nt, Homo sapiens
aaccuccaccuucuggguu

SEQ ID NO: 40461 - RNA, 15 nt, Homo sapiens
aaccucucccaacua

SEQ ID NO: 40462 - RNA, 18 nt, Homo sapiens
aaccucucccaacuauaa

SEQ ID NO: 40463 - RNA, 22 nt, Homo sapiens
aaccuguugauagcaagugaau

SEQ ID NO: 40464 - RNA, 18 nt, Homo sapiens
aaccuuauuguaccucuc

SEQ ID NO: 40465 - RNA, 15 nt, Homo sapiens
aaccuuuacauccag

SEQ ID NO: 40466 - RNA, 17 nt, Homo sapiens
aaccuuuacauccagau

SEQ ID NO: 40467 - RNA, 16 nt, Homo sapiens
aacggaacaguaucca

SEQ ID NO: 40468 - RNA, 13 nt, Homo sapiens
aacggucucucac

SEQ ID NO: 40469 - RNA, 16 nt, Homo sapiens
aacgucccuagcccuu

SEQ ID NO: 40470 - RNA, 13 nt, Homo sapiens
aacuaaaauguuc

SEQ ID NO: 40471 - RNA, 15 nt, Homo sapiens
aacuaaaauguucua

SEQ ID NO: 40472 - RNA, 16 nt, Homo sapiens
aacuauaaaacuaggu

SEQ ID NO: 40473 - RNA, 19 nt, Homo sapiens
aacuauaaaacuaggugcu

SEQ ID NO: 40474 - RNA, 15 nt, Homo sapiens
aacuauauuguuugc

SEQ ID NO: 40475 - RNA, 16 nt, Homo sapiens
aacuaucucauuucca

SEQ ID NO: 40476 - RNA, 21 nt, Homo sapiens
aacucaaggaaaucuguguca

SEQ ID NO: 40477 - RNA, 15 nt, Homo sapiens
aacucagaaacauca

SEQ ID NO: 40478 - RNA, 16 nt, Homo sapiens
aacucagaaacaucag

SEQ ID NO: 40479 - RNA, 13 nt, Homo sapiens
aacucauuuccua

SEQ ID NO: 40480 - RNA, 17 nt, Homo sapiens
aacuccacauccugugg

SEQ ID NO: 40481 - RNA, 18 nt, Homo sapiens
aacuccacauccuguggg

SEQ ID NO: 40482 - RNA, 15 nt, Homo sapiens
aacugaacauuccag

SEQ ID NO: 40483 - RNA, 20 nt, Homo sapiens
aacugacucuuaagaagacu

SEQ ID NO: 40484 - RNA, 15 nt, Homo sapiens
aacugcagcgaguac

SEQ ID NO: 40485 - RNA, 20 nt, Homo sapiens
aacugcagcgaguacuuccc

SEQ ID NO: 40486 - RNA, 14 nt, Homo sapiens
aacugcauugagaa

SEQ ID NO: 40487 - RNA, 18 nt, Homo sapiens
aacugccaucauuuacuu

SEQ ID NO: 40488 - RNA, 16 nt, Homo sapiens
aacuggaaauaaaaga

SEQ ID NO: 40489 - RNA, 17 nt, Homo sapiens
aacuggaaauaaaagau

SEQ ID NO: 40490 - RNA, 22 nt, Homo sapiens
aacugggguggguggggcagug

SEQ ID NO: 40491 - RNA, 18 nt, Homo sapiens
aacuggguuccugcaaug

SEQ ID NO: 40492 - RNA, 17 nt, Homo sapiens
aacuuauuuguacauuu

SEQ ID NO: 40493 - RNA, 23 nt, Homo sapiens
aacuuauuuguacauuuuuuuuu

SEQ ID NO: 40494 - RNA, 15 nt, Homo sapiens
aacuucagcgguuua

SEQ ID NO: 40495 - RNA, 18 nt, Homo sapiens
aacuugaaugugucaggu

SEQ ID NO: 40496 - RNA, 16 nt, Homo sapiens
aacuuuuccaaugaca

SEQ ID NO: 40497 - RNA, 18 nt, Homo sapiens
aacuuuuccaaugacauu

SEQ ID NO: 40498 - RNA, 23 nt, Homo sapiens
aacuuuuuguuuuguuucuuccu

SEQ ID NO: 40499 - RNA, 19 nt, Homo sapiens
aagaaaauggccagugaga

SEQ ID NO: 40500 - RNA, 14 nt, Homo sapiens
aagaaauauuccuu

SEQ ID NO: 40501 - RNA, 23 nt, Homo sapiens
aagaaauguaagggaaacugcca

SEQ ID NO: 40502 - RNA, 14 nt, Homo sapiens
aagaaauucugcaa

SEQ ID NO: 40503 - RNA, 23 nt, Homo sapiens
aagaaauucugcaagcuuuucaa

SEQ ID NO: 40504 - RNA, 18 nt, Homo sapiens
aagaacuaaaauguucua

SEQ ID NO: 40505 - RNA, 14 nt, Homo sapiens
aagaaugauuauga

SEQ ID NO: 40506 - RNA, 12 nt, Homo sapiens
aagacaaaaagc

SEQ ID NO: 40507 - RNA, 13 nt, Homo sapiens
aagacaaaaagcu

SEQ ID NO: 40508 - RNA, 14 nt, Homo sapiens
aagacaaauucugu

SEQ ID NO: 40509 - RNA, 17 nt, Homo sapiens
aagacccaaaaggcaga

SEQ ID NO: 40510 - RNA, 23 nt, Homo sapiens
aagacgugauuuugcuguagaag

SEQ ID NO: 40511 - RNA, 14 nt, Homo sapiens
aagacuauucaaac

SEQ ID NO: 40512 - RNA, 21 nt, Homo sapiens
aagacugaguacguugugcau

SEQ ID NO: 40513 - RNA, 22 nt, Homo sapiens
aagacugaguacguugugcauu

SEQ ID NO: 40514 - RNA, 16 nt, Homo sapiens
aagacugcacaucaaa

SEQ ID NO: 40515 - RNA, 20 nt, Homo sapiens
aagacugcacaucaaaauau

SEQ ID NO: 40516 - RNA, 15 nt, Homo sapiens
aagagaacaagcaaa

SEQ ID NO: 40517 - RNA, 15 nt, Homo sapiens
aagagaacuuccaga

SEQ ID NO: 40518 - RNA, 22 nt, Homo sapiens
aagagaauauuagcuuuacugu

SEQ ID NO: 40519 - RNA, 15 nt, Homo sapiens
aagagaucaagccau

SEQ ID NO: 40520 - RNA, 11 nt, Homo sapiens
aagagcaguag

SEQ ID NO: 40521 - RNA, 11 nt, Homo sapiens
aagagccggag

SEQ ID NO: 40522 - RNA, 13 nt, Homo sapiens
aagagccggagcc

SEQ ID NO: 40523 - RNA, 17 nt, Homo sapiens
aagagccggagccucca

SEQ ID NO: 40524 - RNA, 20 nt, Homo sapiens
aagagccggagccuccagcu

SEQ ID NO: 40525 - RNA, 21 nt, Homo sapiens
aagagccggagccuccagcug

SEQ ID NO: 40526 - RNA, 21 nt, Homo sapiens
aagaggauguguggcauuuuc

SEQ ID NO: 40527 - RNA, 23 nt, Homo sapiens
aagaggauguguggcauuuucac

SEQ ID NO: 40528 - RNA, 23 nt, Homo sapiens
aagaggcagcuugaaacugagau

SEQ ID NO: 40529 - RNA, 20 nt, Homo sapiens
aagauagaagguuugcagau

SEQ ID NO: 40530 - RNA, 15 nt, Homo sapiens
aagauagcagggcau

SEQ ID NO: 40531 - RNA, 20 nt, Homo sapiens
aagauauguaacaacaauua

SEQ ID NO: 40532 - RNA, 16 nt, Homo sapiens
aagaucugcaacuacu

SEQ ID NO: 40533 - RNA, 21 nt, Homo sapiens
aagaucugcaacuacuaucca

SEQ ID NO: 40534 - RNA, 17 nt, Homo sapiens
aagaugaugaugaucuu

SEQ ID NO: 40535 - RNA, 20 nt, Homo sapiens
aagauggcacuuauaaccaa

SEQ ID NO: 40536 - RNA, 22 nt, Homo sapiens
aagauguagaggagaaacugga

SEQ ID NO: 40537 - RNA, 23 nt, Homo sapiens
aagauguagaggagaaacuggaa

SEQ ID NO: 40538 - RNA, 20 nt, Homo sapiens
aagauuguauagugcauguu

SEQ ID NO: 40539 - RNA, 16 nt, Homo sapiens
aagcaaaaugugauau

SEQ ID NO: 40540 - RNA, 21 nt, Homo sapiens
aagcaaagacuaugaggaaua

SEQ ID NO: 40541 - RNA, 19 nt, Homo sapiens
aagcaaauauaaacagcaa

SEQ ID NO: 40542 - RNA, 13 nt, Homo sapiens
aagcaacccaaau

SEQ ID NO: 40543 - RNA, 19 nt, Homo sapiens
aagcaccuuuagaauauua

SEQ ID NO: 40544 - RNA, 15 nt, Homo sapiens
aagcagaacagugau

SEQ ID NO: 40545 - RNA, 16 nt, Homo sapiens
aagcagaacagugauu

SEQ ID NO: 40546 - RNA, 17 nt, Homo sapiens
aagcagaacagugauua

SEQ ID NO: 40547 - RNA, 22 nt, Homo sapiens
aagcagggacuugaacccauau

SEQ ID NO: 40548 - RNA, 17 nt, Homo sapiens
aagcaugugagacuggu

SEQ ID NO: 40549 - RNA, 13 nt, Homo sapiens
aagcauuuagaug

SEQ ID NO: 40550 - RNA, 23 nt, Homo sapiens
aagcauuuuauaaaucgcuuuug

SEQ ID NO: 40551 - RNA, 22 nt, Homo sapiens
aagccagauuuuccugaaaacc

SEQ ID NO: 40552 - RNA, 17 nt, Homo sapiens
aagccucuauugccaug

SEQ ID NO: 40553 - RNA, 19 nt, Homo sapiens
aagccucuauugccaugag

SEQ ID NO: 40554 - RNA, 23 nt, Homo sapiens
aagccugccucaaucaguauuca

SEQ ID NO: 40555 - RNA, 23 nt, Homo sapiens
aagcuagaaaaauuagaugacug

SEQ ID NO: 40556 - RNA, 15 nt, Homo sapiens
aagcugaguguuuca

SEQ ID NO: 40557 - RNA, 14 nt, Homo sapiens
aagcuuauuaaaac

SEQ ID NO: 40558 - RNA, 15 nt, Homo sapiens
aagcuuauuaaaacu

SEQ ID NO: 40559 - RNA, 12 nt, Homo sapiens
aaggaaacuggg

SEQ ID NO: 40560 - RNA, 18 nt, Homo sapiens
aaggaaacuggguuccug

SEQ ID NO: 40561 - RNA, 13 nt, Homo sapiens
aaggaaagauuuu

SEQ ID NO: 40562 - RNA, 14 nt, Homo sapiens
aaggaaagauuuug

SEQ ID NO: 40563 - RNA, 15 nt, Homo sapiens
aaggaaagauuuugu

SEQ ID NO: 40564 - RNA, 13 nt, Homo sapiens
aaggagauuuaca

SEQ ID NO: 40565 - RNA, 17 nt, Homo sapiens
aaggaguccuugcauca

SEQ ID NO: 40566 - RNA, 18 nt, Homo sapiens
aaggaguccuugcaucaa

SEQ ID NO: 40567 - RNA, 20 nt, Homo sapiens
aaggcagcucuaaaugucaa

SEQ ID NO: 40568 - RNA, 22 nt, Homo sapiens
aaggcaggggaauguaugugca

SEQ ID NO: 40569 - RNA, 10 nt, Homo sapiens
aaggcccccg

SEQ ID NO: 40570 - RNA, 18 nt, Homo sapiens
aaggcccccgggccgacg

SEQ ID NO: 40571 - RNA, 19 nt, Homo sapiens
aaggcccccgggccgacgg

SEQ ID NO: 40572 - RNA, 23 nt, Homo sapiens
aaggcccccgggccgacggagcc

SEQ ID NO: 40573 - RNA, 24 nt, Homo sapiens
aaggcccccgggccgacggagccg

SEQ ID NO: 40574 - RNA, 18 nt, Homo sapiens
aaggccugucccugcaga

SEQ ID NO: 40575 - RNA, 22 nt, Homo sapiens
aaggcuuagacccucaugcugc

SEQ ID NO: 40576 - RNA, 15 nt, Homo sapiens
aaggcuuuaucucag

SEQ ID NO: 40577 - RNA, 17 nt, Homo sapiens
aaggcuuuaucucaggg

SEQ ID NO: 40578 - RNA, 15 nt, Homo sapiens
aagggaccucuccau

SEQ ID NO: 40579 - RNA, 18 nt, Homo sapiens
aagggaguuaggcuauuc

SEQ ID NO: 40580 - RNA, 14 nt, Homo sapiens
aagggauggcaaga

SEQ ID NO: 40581 - RNA, 15 nt, Homo sapiens
aaggggcggcggccc

SEQ ID NO: 40582 - RNA, 21 nt, Homo sapiens
aaggggcggcggcccugugcg

SEQ ID NO: 40583 - RNA, 14 nt, Homo sapiens
aagguacuucaaau

SEQ ID NO: 40584 - RNA, 21 nt, Homo sapiens
aagguauuuuaaucaccaagg

SEQ ID NO: 40585 - RNA, 11 nt, Homo sapiens
aaggugaccau

SEQ ID NO: 40586 - RNA, 17 nt, Homo sapiens
aaguaaaaccacagcag

SEQ ID NO: 40587 - RNA, 18 nt, Homo sapiens
aaguaaaaccacagcagu

SEQ ID NO: 40588 - RNA, 17 nt, Homo sapiens
aaguaaacggucucuca

SEQ ID NO: 40589 - RNA, 20 nt, Homo sapiens
aaguaaacggucucucacuu

SEQ ID NO: 40590 - RNA, 14 nt, Homo sapiens
aaguaaugauaacu

SEQ ID NO: 40591 - RNA, 18 nt, Homo sapiens
aaguacauguuaaacuua

SEQ ID NO: 40592 - RNA, 12 nt, Homo sapiens
aaguauccuuca

SEQ ID NO: 40593 - RNA, 17 nt, Homo sapiens
aaguauccuucagccug

SEQ ID NO: 40594 - RNA, 17 nt, Homo sapiens
aaguaugcacuaaucaa

SEQ ID NO: 40595 - RNA, 19 nt, Homo sapiens
aaguaugcacuaaucaaua

SEQ ID NO: 40596 - RNA, 14 nt, Homo sapiens
aaguaugugcauau

SEQ ID NO: 40597 - RNA, 15 nt, Homo sapiens
aagucaaggcuuaga

SEQ ID NO: 40598 - RNA, 19 nt, Homo sapiens
aagucacauuccugaacag

SEQ ID NO: 40599 - RNA, 22 nt, Homo sapiens
aagucagugcccaacuguuaua

SEQ ID NO: 40600 - RNA, 12 nt, Homo sapiens
aaguccaagcau

SEQ ID NO: 40601 - RNA, 18 nt, Homo sapiens
aaguccaagcauaccaac

SEQ ID NO: 40602 - RNA, 16 nt, Homo sapiens
aaguccaagcauuuag

SEQ ID NO: 40603 - RNA, 20 nt, Homo sapiens
aaguccaagcauuuagaugu

SEQ ID NO: 40604 - RNA, 15 nt, Homo sapiens
aagucccagaucaag

SEQ ID NO: 40605 - RNA, 14 nt, Homo sapiens
aagucuuccauaga

SEQ ID NO: 40606 - RNA, 22 nt, Homo sapiens
aagucuuccauagagacuuugu

SEQ ID NO: 40607 - RNA, 13 nt, Homo sapiens
aagugaaacugcu

SEQ ID NO: 40608 - RNA, 17 nt, Homo sapiens
aagugaagacaaugacu

SEQ ID NO: 40609 - RNA, 15 nt, Homo sapiens
aagugauacuaucca

SEQ ID NO: 40610 - RNA, 17 nt, Homo sapiens
aagugauacuauccagu

SEQ ID NO: 40611 - RNA, 23 nt, Homo sapiens
aagugcugggaauuacaggcgug

SEQ ID NO: 40612 - RNA, 12 nt, Homo sapiens
aaguucuaguga

SEQ ID NO: 40613 - RNA, 16 nt, Homo sapiens
aaguucuagugaccga

SEQ ID NO: 40614 - RNA, 17 nt, Homo sapiens
aaguucuagugaccgag

SEQ ID NO: 40615 - RNA, 18 nt, Homo sapiens
aaguucuuaguugcugua

SEQ ID NO: 40616 - RNA, 21 nt, Homo sapiens
aaguugaauuuuacauggcug

SEQ ID NO: 40617 - RNA, 16 nt, Homo sapiens
aaguugcaccaacuuu

SEQ ID NO: 40618 - RNA, 19 nt, Homo sapiens
aaguugcaccaacuuugaa

SEQ ID NO: 40619 - RNA, 17 nt, Homo sapiens
aauaaaaaggugaccau

SEQ ID NO: 40620 - RNA, 20 nt, Homo sapiens
aauaaaacuuuuccaaugac

SEQ ID NO: 40621 - RNA, 23 nt, Homo sapiens
aauaaaagauuguauagugcaug

SEQ ID NO: 40622 - RNA, 13 nt, Homo sapiens
aauaaaagcacuu

SEQ ID NO: 40623 - RNA, 14 nt, Homo sapiens
aauaaaagcacuua

SEQ ID NO: 40624 - RNA, 15 nt, Homo sapiens
aauaaaauacauacu

SEQ ID NO: 40625 - RNA, 16 nt, Homo sapiens
aauaaaaugagcaaaa

SEQ ID NO: 40626 - RNA, 19 nt, Homo sapiens
aauaauacaccagagauaa

SEQ ID NO: 40627 - RNA, 15 nt, Homo sapiens
aauaauuuuuauauu

SEQ ID NO: 40628 - RNA, 20 nt, Homo sapiens
aauacaaaaauuagccgggc

SEQ ID NO: 40629 - RNA, 17 nt, Homo sapiens
aauacacacucaaauca

SEQ ID NO: 40630 - RNA, 13 nt, Homo sapiens
aauacacuguuau

SEQ ID NO: 40631 - RNA, 14 nt, Homo sapiens
aauacacuguuauc

SEQ ID NO: 40632 - RNA, 15 nt, Homo sapiens
aauacacuguuaucu

SEQ ID NO: 40633 - RNA, 22 nt, Homo sapiens
aauacauaaaguaugugcauau

SEQ ID NO: 40634 - RNA, 24 nt, Homo sapiens
aauacauaaaguaugugcauauuu

SEQ ID NO: 40635 - RNA, 20 nt, Homo sapiens
aauacauuauuggacuucca

SEQ ID NO: 40636 - RNA, 20 nt, Homo sapiens
aauacucuuaggaagagaaa

SEQ ID NO: 40637 - RNA, 23 nt, Homo sapiens
aauacucuuaggaagagaaacca

SEQ ID NO: 40638 - RNA, 24 nt, Homo sapiens
aauacucuuaggaagagaaaccag

SEQ ID NO: 40639 - RNA, 16 nt, Homo sapiens
aauacucuuauaucua

SEQ ID NO: 40640 - RNA, 19 nt, Homo sapiens
aauacucuuauaucuauau

SEQ ID NO: 40641 - RNA, 20 nt, Homo sapiens
aauacucuuauaucuauauu

SEQ ID NO: 40642 - RNA, 11 nt, Homo sapiens
aauacugaugu

SEQ ID NO: 40643 - RNA, 20 nt, Homo sapiens
aauacugauguuccuaguga

SEQ ID NO: 40644 - RNA, 22 nt, Homo sapiens
aauacugauguuccuagugaaa

SEQ ID NO: 40645 - RNA, 20 nt, Homo sapiens
aauacuguuugagguuuuua

SEQ ID NO: 40646 - RNA, 21 nt, Homo sapiens
aauacuguuugagguuuuuaa

SEQ ID NO: 40647 - RNA, 14 nt, Homo sapiens
aauacuuugaacac

SEQ ID NO: 40648 - RNA, 19 nt, Homo sapiens
aauagaaggauguacauuu

SEQ ID NO: 40649 - RNA, 21 nt, Homo sapiens
aauagcuaagauauaauuuaa

SEQ ID NO: 40650 - RNA, 21 nt, Homo sapiens
aauaggaaauauuuuaauguu

SEQ ID NO: 40651 - RNA, 18 nt, Homo sapiens
aauagguuuggacaaaau

SEQ ID NO: 40652 - RNA, 22 nt, Homo sapiens
aauaguguuggaaaaugugcaa

SEQ ID NO: 40653 - RNA, 14 nt, Homo sapiens
aauauaaagcaaga

SEQ ID NO: 40654 - RNA, 15 nt, Homo sapiens
aauauaaauuuauca

SEQ ID NO: 40655 - RNA, 20 nt, Homo sapiens
aauauaaauuuaucauuuag

SEQ ID NO: 40656 - RNA, 19 nt, Homo sapiens
aauauaauaugcacacagu

SEQ ID NO: 40657 - RNA, 23 nt, Homo sapiens
aauauagcuuucauaacaucgaa

SEQ ID NO: 40658 - RNA, 19 nt, Homo sapiens
aauaucuccgucaacucau

SEQ ID NO: 40659 - RNA, 14 nt, Homo sapiens
aauaucuuaucuuc

SEQ ID NO: 40660 - RNA, 16 nt, Homo sapiens
aauaucuuaucuuccu

SEQ ID NO: 40661 - RNA, 20 nt, Homo sapiens
aauauguuagagaauuuccu

SEQ ID NO: 40662 - RNA, 13 nt, Homo sapiens
aauauuguugaca

SEQ ID NO: 40663 - RNA, 14 nt, Homo sapiens
aauauuguugacaa

SEQ ID NO: 40664 - RNA, 22 nt, Homo sapiens
aauauuguugacaacugugacu

SEQ ID NO: 40665 - RNA, 23 nt, Homo sapiens
aauauuguugacaacugugacug

SEQ ID NO: 40666 - RNA, 17 nt, Homo sapiens
aauauuugcaagacaua

SEQ ID NO: 40667 - RNA, 22 nt, Homo sapiens
aauauuuuagguguaaaauaau

SEQ ID NO: 40668 - RNA, 17 nt, Homo sapiens
aauauuuuuaugugcaa

SEQ ID NO: 40669 - RNA, 19 nt, Homo sapiens
aauauuuuuaugugcaaua

SEQ ID NO: 40670 - RNA, 20 nt, Homo sapiens
aaucaaauaugcaaagcacu

SEQ ID NO: 40671 - RNA, 19 nt, Homo sapiens
aaucacucauuuauuucca

SEQ ID NO: 40672 - RNA, 15 nt, Homo sapiens
aaucagaucauuuca

SEQ ID NO: 40673 - RNA, 18 nt, Homo sapiens
aaucauaugggauacugc

SEQ ID NO: 40674 - RNA, 22 nt, Homo sapiens
aauccaagaaaauggccaguga

SEQ ID NO: 40675 - RNA, 18 nt, Homo sapiens
aauccagaaauaaugaaa

SEQ ID NO: 40676 - RNA, 14 nt, Homo sapiens
aaucccagcacuuu

SEQ ID NO: 40677 - RNA, 20 nt, Homo sapiens
aaucuaaauggaaccacucu

SEQ ID NO: 40678 - RNA, 12 nt, Homo sapiens
aaucuacacucc

SEQ ID NO: 40679 - RNA, 16 nt, Homo sapiens
aaucucuccauucccg

SEQ ID NO: 40680 - RNA, 18 nt, Homo sapiens
aaucugaggccuccucuc

SEQ ID NO: 40681 - RNA, 23 nt, Homo sapiens
aaucugaggccuccucucucagu

SEQ ID NO: 40682 - RNA, 13 nt, Homo sapiens
aaucugcacugug

SEQ ID NO: 40683 - RNA, 13 nt, Homo sapiens
aaucuggauucau

SEQ ID NO: 40684 - RNA, 21 nt, Homo sapiens
aaucuuuauaguucuacucca

SEQ ID NO: 40685 - RNA, 17 nt, Homo sapiens
aaugaagauacugaaau

SEQ ID NO: 40686 - RNA, 14 nt, Homo sapiens
aaugaaguacucau

SEQ ID NO: 40687 - RNA, 14 nt, Homo sapiens
aaugaaugaaugaa

SEQ ID NO: 40688 - RNA, 13 nt, Homo sapiens
aaugaauggcuaa

SEQ ID NO: 40689 - RNA, 22 nt, Homo sapiens
aaugacacuagcuaauaucaau

SEQ ID NO: 40690 - RNA, 21 nt, Homo sapiens
aaugacuuacuguacaugaaa

SEQ ID NO: 40691 - RNA, 21 nt, Homo sapiens
aaugagaagaaugacuaugca

SEQ ID NO: 40692 - RNA, 17 nt, Homo sapiens
aaugauuucacagugug

SEQ ID NO: 40693 - RNA, 18 nt, Homo sapiens
aaugauuucacagugugu

SEQ ID NO: 40694 - RNA, 15 nt, Homo sapiens
aaugauuucauucaa

SEQ ID NO: 40695 - RNA, 23 nt, Homo sapiens
aaugauuuuacggagauauccca

SEQ ID NO: 40696 - RNA, 19 nt, Homo sapiens
aaugccccugaauuuaaau

SEQ ID NO: 40697 - RNA, 23 nt, Homo sapiens
aaugccccugaauuuaaauagcu

SEQ ID NO: 40698 - RNA, 17 nt, Homo sapiens
aauggaaaguaacucau

SEQ ID NO: 40699 - RNA, 12 nt, Homo sapiens
aauggaauacuc

SEQ ID NO: 40700 - RNA, 17 nt, Homo sapiens
aauggagacaccaccac

SEQ ID NO: 40701 - RNA, 13 nt, Homo sapiens
aauggcaugucag

SEQ ID NO: 40702 - RNA, 14 nt, Homo sapiens
aauggccagugaga

SEQ ID NO: 40703 - RNA, 12 nt, Homo sapiens
aaugggcuacuu

SEQ ID NO: 40704 - RNA, 20 nt, Homo sapiens
aaugguaguuuuacaguguu

SEQ ID NO: 40705 - RNA, 13 nt, Homo sapiens
aaugguauuaaag

SEQ ID NO: 40706 - RNA, 20 nt, Homo sapiens
aaugguuaaaagagguuuuu

SEQ ID NO: 40707 - RNA, 16 nt, Homo sapiens
aaugguuccauucucu

SEQ ID NO: 40708 - RNA, 23 nt, Homo sapiens
aaugugacuuggauucaauuuua

SEQ ID NO: 40709 - RNA, 16 nt, Homo sapiens
aauguguaagacaaaa

SEQ ID NO: 40710 - RNA, 23 nt, Homo sapiens
aaugugucaggugacccugauga

SEQ ID NO: 40711 - RNA, 14 nt, Homo sapiens
aauguguuugagca

SEQ ID NO: 40712 - RNA, 23 nt, Homo sapiens
aauguuaauuaugcaguguuucc

SEQ ID NO: 40713 - RNA, 16 nt, Homo sapiens
aauguucaucaaugaa

SEQ ID NO: 40714 - RNA, 21 nt, Homo sapiens
aauguucuccagucauuaugu

SEQ ID NO: 40715 - RNA, 21 nt, Homo sapiens
aauguugacaugggacauuug

SEQ ID NO: 40716 - RNA, 13 nt, Homo sapiens
aauguuguucucu

SEQ ID NO: 40717 - RNA, 18 nt, Homo sapiens
aauguuuagcagauuuaa

SEQ ID NO: 40718 - RNA, 13 nt, Homo sapiens
aauguuucaaaca

SEQ ID NO: 40719 - RNA, 14 nt, Homo sapiens
aauguuucaaacau

SEQ ID NO: 40720 - RNA, 14 nt, Homo sapiens
aauuaaagcuaaag

SEQ ID NO: 40721 - RNA, 22 nt, Homo sapiens
aauuaaggguaugauuaacucu

SEQ ID NO: 40722 - RNA, 13 nt, Homo sapiens
aauuagaugacug

SEQ ID NO: 40723 - RNA, 12 nt, Homo sapiens
aauuagccgggc

SEQ ID NO: 40724 - RNA, 13 nt, Homo sapiens
aauuauauaguua

SEQ ID NO: 40725 - RNA, 16 nt, Homo sapiens
aauuauauauacuaua

SEQ ID NO: 40726 - RNA, 17 nt, Homo sapiens
aauuauauauacuauau

SEQ ID NO: 40727 - RNA, 21 nt, Homo sapiens
aauuauauauacuauauuuuu

SEQ ID NO: 40728 - RNA, 20 nt, Homo sapiens
aauuauauuuugaacaacuc

SEQ ID NO: 40729 - RNA, 16 nt, Homo sapiens
aauuauugauguuuuc

SEQ ID NO: 40730 - RNA, 19 nt, Homo sapiens
aauuauugauguuuucaua

SEQ ID NO: 40731 - RNA, 20 nt, Homo sapiens
aauuauugauguuuucauag

SEQ ID NO: 40732 - RNA, 14 nt, Homo sapiens
aauuauuucacuuu

SEQ ID NO: 40733 - RNA, 16 nt, Homo sapiens
aauuauuucacuuuag

SEQ ID NO: 40734 - RNA, 13 nt, Homo sapiens
aauucacuccacu

SEQ ID NO: 40735 - RNA, 17 nt, Homo sapiens
aauucacuccacuugga

SEQ ID NO: 40736 - RNA, 12 nt, Homo sapiens
aauucauguuuc

SEQ ID NO: 40737 - RNA, 15 nt, Homo sapiens
aauucauuccauuug

SEQ ID NO: 40738 - RNA, 16 nt, Homo sapiens
aauuccaauacauuau

SEQ ID NO: 40739 - RNA, 13 nt, Homo sapiens
aauuccucuggga

SEQ ID NO: 40740 - RNA, 14 nt, Homo sapiens
aauuccucugggaa

SEQ ID NO: 40741 - RNA, 15 nt, Homo sapiens
aauucgcugcaaccu

SEQ ID NO: 40742 - RNA, 19 nt, Homo sapiens
aauucuauuacgugcaaua

SEQ ID NO: 40743 - RNA, 21 nt, Homo sapiens
aauucuauuacgugcaauacu

SEQ ID NO: 40744 - RNA, 15 nt, Homo sapiens
aauucugcaagcuuu

SEQ ID NO: 40745 - RNA, 13 nt, Homo sapiens
aauugacacuuaa

SEQ ID NO: 40746 - RNA, 12 nt, Homo sapiens
aauugcuaucgc

SEQ ID NO: 40747 - RNA, 17 nt, Homo sapiens
aauuuaaauagcuuuuu

SEQ ID NO: 40748 - RNA, 12 nt, Homo sapiens
aauuuacuuugu

SEQ ID NO: 40749 - RNA, 18 nt, Homo sapiens
aauuuauucaauuccucu

SEQ ID NO: 40750 - RNA, 16 nt, Homo sapiens
aauuucauaccuauca

SEQ ID NO: 40751 - RNA, 20 nt, Homo sapiens
aauuucauaccuaucaucuu

SEQ ID NO: 40752 - RNA, 13 nt, Homo sapiens
aauuuccuuacuc

SEQ ID NO: 40753 - RNA, 19 nt, Homo sapiens
aauuucuaggacugaauua

SEQ ID NO: 40754 - RNA, 18 nt, Homo sapiens
aauuugauaugugaacag

SEQ ID NO: 40755 - RNA, 21 nt, Homo sapiens
aauuugguucuaggccgggcg

SEQ ID NO: 40756 - RNA, 16 nt, Homo sapiens
aauuugguuuucacau

SEQ ID NO: 40757 - RNA, 22 nt, Homo sapiens
aauuuucaaaaucaaauuccag

SEQ ID NO: 40758 - RNA, 17 nt, Homo sapiens
aauuuucccucuucacu

SEQ ID NO: 40759 - RNA, 13 nt, Homo sapiens
aauuuucuuccaa

SEQ ID NO: 40760 - RNA, 15 nt, Homo sapiens
aauuuugugaagcaa

SEQ ID NO: 40761 - RNA, 16 nt, Homo sapiens
aauuuugugaagcaaa

SEQ ID NO: 40762 - RNA, 18 nt, Homo sapiens
aauuuugugaagcaaaau

SEQ ID NO: 40763 - RNA, 16 nt, Homo sapiens
aauuuuuucucuagga

SEQ ID NO: 40764 - RNA, 14 nt, Homo sapiens
acaaaaaaagcauu

SEQ ID NO: 40765 - RNA, 19 nt, Homo sapiens
acaaaaauuagccgggcau

SEQ ID NO: 40766 - RNA, 13 nt, Homo sapiens
acaaaauauagcu

SEQ ID NO: 40767 - RNA, 19 nt, Homo sapiens
acaaaauggaauacucuua

SEQ ID NO: 40768 - RNA, 16 nt, Homo sapiens
acaaagaagacaacau

SEQ ID NO: 40769 - RNA, 22 nt, Homo sapiens
acaaaggggcuuaauuauugau

SEQ ID NO: 40770 - RNA, 18 nt, Homo sapiens
acaacauuaaaacaauau

SEQ ID NO: 40771 - RNA, 13 nt, Homo sapiens
acaaccuguccca

SEQ ID NO: 40772 - RNA, 17 nt, Homo sapiens
acaacucgaaucacuca

SEQ ID NO: 40773 - RNA, 18 nt, Homo sapiens
acaacuugaauaauacac

SEQ ID NO: 40774 - RNA, 22 nt, Homo sapiens
acaagacugcacaucaaaauau

SEQ ID NO: 40775 - RNA, 20 nt, Homo sapiens
acaaggaugaauuaaguuuu

SEQ ID NO: 40776 - RNA, 19 nt, Homo sapiens
acaaggcuuuaucucaggg

SEQ ID NO: 40777 - RNA, 23 nt, Homo sapiens
acaagguucuucccuuuuacaua

SEQ ID NO: 40778 - RNA, 16 nt, Homo sapiens
acaagucagucauuca

SEQ ID NO: 40779 - RNA, 18 nt, Homo sapiens
acaagugaaaaacaucca

SEQ ID NO: 40780 - RNA, 14 nt, Homo sapiens
acaauacaucccuu

SEQ ID NO: 40781 - RNA, 15 nt, Homo sapiens
acaaugaacacuuau

SEQ ID NO: 40782 - RNA, 17 nt, Homo sapiens
acaaugacuuacuguac

SEQ ID NO: 40783 - RNA, 19 nt, Homo sapiens
acaaugacuuguacucuga

SEQ ID NO: 40784 - RNA, 11 nt, Homo sapiens
acaaugcauuc

SEQ ID NO: 40785 - RNA, 21 nt, Homo sapiens
acaauuauuuuuacaguucuc

SEQ ID NO: 40786 - RNA, 23 nt, Homo sapiens
acacacaugaaguccaagcauuu

SEQ ID NO: 40787 - RNA, 17 nt, Homo sapiens
acacaggcuccaaacug

SEQ ID NO: 40788 - RNA, 14 nt, Homo sapiens
acacagugucuggc

SEQ ID NO: 40789 - RNA, 22 nt, Homo sapiens
acacaugauccugcaauuccac

SEQ ID NO: 40790 - RNA, 18 nt, Homo sapiens
acacauuuuucuuaggga

SEQ ID NO: 40791 - RNA, 20 nt, Homo sapiens
acacauuuuuuaaaugcacc

SEQ ID NO: 40792 - RNA, 21 nt, Homo sapiens
acacauuuuuuaaaugcaccu

SEQ ID NO: 40793 - RNA, 12 nt, Homo sapiens
acaccaccaccc

SEQ ID NO: 40794 - RNA, 22 nt, Homo sapiens
acaccagagauaauaugagaau

SEQ ID NO: 40795 - RNA, 20 nt, Homo sapiens
acaccaggauuuaaguuuca

SEQ ID NO: 40796 - RNA, 23 nt, Homo sapiens
acaccgaguggcccuucauguac

SEQ ID NO: 40797 - RNA, 13 nt, Homo sapiens
acaccucagcugc

SEQ ID NO: 40798 - RNA, 16 nt, Homo sapiens
acaccucagcugccuc

SEQ ID NO: 40799 - RNA, 19 nt, Homo sapiens
acacuaaaaaggcauguaa

SEQ ID NO: 40800 - RNA, 14 nt, Homo sapiens
acacuaaaacaccu

SEQ ID NO: 40801 - RNA, 17 nt, Homo sapiens
acacucaaaucaagaaa

SEQ ID NO: 40802 - RNA, 20 nt, Homo sapiens
acacugcauguuugugauug

SEQ ID NO: 40803 - RNA, 11 nt, Homo sapiens
acacuguccau

SEQ ID NO: 40804 - RNA, 18 nt, Homo sapiens
acacuguuaucuucacuu

SEQ ID NO: 40805 - RNA, 20 nt, Homo sapiens
acacuguuaucuucacuuuu

SEQ ID NO: 40806 - RNA, 15 nt, Homo sapiens
acacuuauaagugaa

SEQ ID NO: 40807 - RNA, 11 nt, Homo sapiens
acagaaaaguu

SEQ ID NO: 40808 - RNA, 12 nt, Homo sapiens
acagaacuugaa

SEQ ID NO: 40809 - RNA, 15 nt, Homo sapiens
acagaagagugacau

SEQ ID NO: 40810 - RNA, 16 nt, Homo sapiens
acagagaaaagacaua

SEQ ID NO: 40811 - RNA, 20 nt, Homo sapiens
acagagcaagacucugucuc

SEQ ID NO: 40812 - RNA, 14 nt, Homo sapiens
acagaguuguuaca

SEQ ID NO: 40813 - RNA, 16 nt, Homo sapiens
acagaguuguuacauu

SEQ ID NO: 40814 - RNA, 18 nt, Homo sapiens
acagcaacuuguguuccu

SEQ ID NO: 40815 - RNA, 20 nt, Homo sapiens
acagcaagggugaugggaaa

SEQ ID NO: 40816 - RNA, 16 nt, Homo sapiens
acagcacuuacaauuu

SEQ ID NO: 40817 - RNA, 16 nt, Homo sapiens
acagcccaaggguggg

SEQ ID NO: 40818 - RNA, 18 nt, Homo sapiens
acagcccuucuuuccaca

SEQ ID NO: 40819 - RNA, 17 nt, Homo sapiens
acagcuacuugggaggc

SEQ ID NO: 40820 - RNA, 18 nt, Homo sapiens
acagcuacuugggaggcu

SEQ ID NO: 40821 - RNA, 20 nt, Homo sapiens
acagcuacuugggaggcuga

SEQ ID NO: 40822 - RNA, 19 nt, Homo sapiens
acagcuccaagaauuucua

SEQ ID NO: 40823 - RNA, 12 nt, Homo sapiens
acaggaaccaca

SEQ ID NO: 40824 - RNA, 22 nt, Homo sapiens
acaggaaguagaggaggccacg

SEQ ID NO: 40825 - RNA, 17 nt, Homo sapiens
acaggacagcccuucuu

SEQ ID NO: 40826 - RNA, 21 nt, Homo sapiens
acaggacagcccuucuuucca

SEQ ID NO: 40827 - RNA, 19 nt, Homo sapiens
acaggaggggaaggcaaca

SEQ ID NO: 40828 - RNA, 15 nt, Homo sapiens
acaggauauucucac

SEQ ID NO: 40829 - RNA, 14 nt, Homo sapiens
acaggcaaauuccu

SEQ ID NO: 40830 - RNA, 16 nt, Homo sapiens
acagggaaagggucuc

SEQ ID NO: 40831 - RNA, 16 nt, Homo sapiens
acaguauggcagcuuu

SEQ ID NO: 40832 - RNA, 22 nt, Homo sapiens
acaguauggcagcuuuccucaa

SEQ ID NO: 40833 - RNA, 22 nt, Homo sapiens
acagucacauuccaagccucau

SEQ ID NO: 40834 - RNA, 22 nt, Homo sapiens
acagucuuguauuaaguuguua

SEQ ID NO: 40835 - RNA, 19 nt, Homo sapiens
acagugagacucugucuca

SEQ ID NO: 40836 - RNA, 14 nt, Homo sapiens
acagugucuggcac

SEQ ID NO: 40837 - RNA, 16 nt, Homo sapiens
acagugucuggcacuu

SEQ ID NO: 40838 - RNA, 15 nt, Homo sapiens
acaguguuucuggcu

SEQ ID NO: 40839 - RNA, 17 nt, Homo sapiens
acaguuaccucugccuc

SEQ ID NO: 40840 - RNA, 15 nt, Homo sapiens
acaguuccugagacc

SEQ ID NO: 40841 - RNA, 22 nt, Homo sapiens
acaguuuucugcuuuaauuuca

SEQ ID NO: 40842 - RNA, 20 nt, Homo sapiens
acaguuuugguugcuuuaau

SEQ ID NO: 40843 - RNA, 18 nt, Homo sapiens
acaguuuuuauugcuugu

SEQ ID NO: 40844 - RNA, 19 nt, Homo sapiens
acaguuuuuauugcuuguu

SEQ ID NO: 40845 - RNA, 14 nt, Homo sapiens
acauaacauaagcu

SEQ ID NO: 40846 - RNA, 18 nt, Homo sapiens
acauaaggaaacuggguu

SEQ ID NO: 40847 - RNA, 19 nt, Homo sapiens
acauaaggaaacuggguuc

SEQ ID NO: 40848 - RNA, 15 nt, Homo sapiens
acauagcaucucagg

SEQ ID NO: 40849 - RNA, 17 nt, Homo sapiens
acauaucacaugucagc

SEQ ID NO: 40850 - RNA, 17 nt, Homo sapiens
acauauccuuagcccau

SEQ ID NO: 40851 - RNA, 21 nt, Homo sapiens
acauauugauuuccguuaaaa

SEQ ID NO: 40852 - RNA, 16 nt, Homo sapiens
acaucaguuacucuga

SEQ ID NO: 40853 - RNA, 18 nt, Homo sapiens
acauccagauagguuacc

SEQ ID NO: 40854 - RNA, 19 nt, Homo sapiens
acauccagauagguuacca

SEQ ID NO: 40855 - RNA, 14 nt, Homo sapiens
acaucucugcaauc

SEQ ID NO: 40856 - RNA, 11 nt, Homo sapiens
acaucuuucac

SEQ ID NO: 40857 - RNA, 14 nt, Homo sapiens
acaucuuucacauu

SEQ ID NO: 40858 - RNA, 20 nt, Homo sapiens
acaugaaguccaagcauuua

SEQ ID NO: 40859 - RNA, 15 nt, Homo sapiens
acaugagagacagca

SEQ ID NO: 40860 - RNA, 19 nt, Homo sapiens
acaugagccuuuguugcua

SEQ ID NO: 40861 - RNA, 14 nt, Homo sapiens
acaugauccugcaa

SEQ ID NO: 40862 - RNA, 20 nt, Homo sapiens
acaugauccugcaauuccac

SEQ ID NO: 40863 - RNA, 18 nt, Homo sapiens
acaugccagccacuguga

SEQ ID NO: 40864 - RNA, 14 nt, Homo sapiens
acauggcuggagcu

SEQ ID NO: 40865 - RNA, 21 nt, Homo sapiens
acauggcuggagcuagaauuu

SEQ ID NO: 40866 - RNA, 16 nt, Homo sapiens
acauguauguaaauag

SEQ ID NO: 40867 - RNA, 14 nt, Homo sapiens
acauucuguuaauc

SEQ ID NO: 40868 - RNA, 14 nt, Homo sapiens
acauuggcuauuua

SEQ ID NO: 40869 - RNA, 20 nt, Homo sapiens
acauuguuugucugucuuca

SEQ ID NO: 40870 - RNA, 17 nt, Homo sapiens
acauuucucauguugaa

SEQ ID NO: 40871 - RNA, 17 nt, Homo sapiens
acauuuuaugucuuucu

SEQ ID NO: 40872 - RNA, 21 nt, Homo sapiens
acauuuuucuuagggaaggau

SEQ ID NO: 40873 - RNA, 19 nt, Homo sapiens
accaaaaaucucaauauuu

SEQ ID NO: 40874 - RNA, 16 nt, Homo sapiens
accaaauugagcuagg

SEQ ID NO: 40875 - RNA, 13 nt, Homo sapiens
accaaauuuguau

SEQ ID NO: 40876 - RNA, 21 nt, Homo sapiens
accaaggcccccgggccgacg

SEQ ID NO: 40877 - RNA, 22 nt, Homo sapiens
accaaggcccccgggccgacgg

SEQ ID NO: 40878 - RNA, 12 nt, Homo sapiens
accaaggcugau

SEQ ID NO: 40879 - RNA, 20 nt, Homo sapiens
accaaggcugauuaaaccaa

SEQ ID NO: 40880 - RNA, 13 nt, Homo sapiens
accaauauuguac

SEQ ID NO: 40881 - RNA, 16 nt, Homo sapiens
accaauauuguacagu

SEQ ID NO: 40882 - RNA, 18 nt, Homo sapiens
accaccacccuugccaug

SEQ ID NO: 40883 - RNA, 15 nt, Homo sapiens
accacccuugccaug

SEQ ID NO: 40884 - RNA, 17 nt, Homo sapiens
accacccuugccaugga

SEQ ID NO: 40885 - RNA, 14 nt, Homo sapiens
accagacucuauaa

SEQ ID NO: 40886 - RNA, 15 nt, Homo sapiens
accagacucuauaaa

SEQ ID NO: 40887 - RNA, 13 nt, Homo sapiens
accagcagaaaug

SEQ ID NO: 40888 - RNA, 12 nt, Homo sapiens
accagccugguc

SEQ ID NO: 40889 - RNA, 22 nt, Homo sapiens
accagccuggucaacaugguga

SEQ ID NO: 40890 - RNA, 16 nt, Homo sapiens
accaggcacccccaga

SEQ ID NO: 40891 - RNA, 12 nt, Homo sapiens
accagggacuga

SEQ ID NO: 40892 - RNA, 11 nt, Homo sapiens
accagggagcc

SEQ ID NO: 40893 - RNA, 15 nt, Homo sapiens
accagggccuggcug

SEQ ID NO: 40894 - RNA, 14 nt, Homo sapiens
accaguauucccuu

SEQ ID NO: 40895 - RNA, 18 nt, Homo sapiens
accauaaauuuaaaugga

SEQ ID NO: 40896 - RNA, 20 nt, Homo sapiens
accaucaauuuuaguuguca

SEQ ID NO: 40897 - RNA, 11 nt, Homo sapiens
accaucccggc

SEQ ID NO: 40898 - RNA, 15 nt, Homo sapiens
accaucccggccggc

SEQ ID NO: 40899 - RNA, 17 nt, Homo sapiens
accaucccggccggcgc

SEQ ID NO: 40900 - RNA, 19 nt, Homo sapiens
accaucccggccggcgcgc

SEQ ID NO: 40901 - RNA, 21 nt, Homo sapiens
accaucccggccggcgcgcuc

SEQ ID NO: 40902 - RNA, 18 nt, Homo sapiens
accauuuuugaaaccaaa

SEQ ID NO: 40903 - RNA, 14 nt, Homo sapiens
acccaaaguaucag

SEQ ID NO: 40904 - RNA, 23 nt, Homo sapiens
acccaaaguaucaggacgagaau

SEQ ID NO: 40905 - RNA, 23 nt, Homo sapiens
acccaaguuaguucaauccugau

SEQ ID NO: 40906 - RNA, 17 nt, Homo sapiens
acccacaagaaaugaaa

SEQ ID NO: 40907 - RNA, 24 nt, Homo sapiens
accccagggcuugugugcacauau

SEQ ID NO: 40908 - RNA, 10 nt, Homo sapiens
acccccagaa

SEQ ID NO: 40909 - RNA, 20 nt, Homo sapiens
accccggaagccaaaccucu

SEQ ID NO: 40910 - RNA, 13 nt, Homo sapiens
acccggccugauu

SEQ ID NO: 40911 - RNA, 12 nt, Homo sapiens
acccgggaggca

SEQ ID NO: 40912 - RNA, 11 nt, Homo sapiens
acccucugggu

SEQ ID NO: 40913 - RNA, 13 nt, Homo sapiens
acccucugggucu

SEQ ID NO: 40914 - RNA, 13 nt, Homo sapiens
accgcaaugugac

SEQ ID NO: 40915 - RNA, 21 nt, Homo sapiens
accgcagggugaacugcagcg

SEQ ID NO: 40916 - RNA, 16 nt, Homo sapiens
accgcuguacgcgagc

SEQ ID NO: 40917 - RNA, 17 nt, Homo sapiens
accgcuguacgcgagcg

SEQ ID NO: 40918 - RNA, 22 nt, Homo sapiens
accgcuguacgcgagcgcgcgc

SEQ ID NO: 40919 - RNA, 18 nt, Homo sapiens
accguuugugauugccau

SEQ ID NO: 40920 - RNA, 16 nt, Homo sapiens
accuaaauuugguucu

SEQ ID NO: 40921 - RNA, 13 nt, Homo sapiens
accuacaguguac

SEQ ID NO: 40922 - RNA, 14 nt, Homo sapiens
accuacaguguaca

SEQ ID NO: 40923 - RNA, 19 nt, Homo sapiens
accuacaugagguacugag

SEQ ID NO: 40924 - RNA, 13 nt, Homo sapiens
accucauggaauu

SEQ ID NO: 40925 - RNA, 12 nt, Homo sapiens
accucauuauca

SEQ ID NO: 40926 - RNA, 16 nt, Homo sapiens
accuccaccuucuggg

SEQ ID NO: 40927 - RNA, 23 nt, Homo sapiens
accucccauucacagauaccucu

SEQ ID NO: 40928 - RNA, 13 nt, Homo sapiens
accuccuccuuca

SEQ ID NO: 40929 - RNA, 12 nt, Homo sapiens
accuccugccuc

SEQ ID NO: 40930 - RNA, 11 nt, Homo sapiens
accucuaaauu

SEQ ID NO: 40931 - RNA, 14 nt, Homo sapiens
accucuccagccuc

SEQ ID NO: 40932 - RNA, 19 nt, Homo sapiens
accucucccaacuauaaaa

SEQ ID NO: 40933 - RNA, 20 nt, Homo sapiens
accucucuuguagcucucug

SEQ ID NO: 40934 - RNA, 18 nt, Homo sapiens
accucugccucagaaaac

SEQ ID NO: 40935 - RNA, 12 nt, Homo sapiens
accucugcuauu

SEQ ID NO: 40936 - RNA, 17 nt, Homo sapiens
accugacagcccaaggg

SEQ ID NO: 40937 - RNA, 10 nt, Homo sapiens
accugagccc

SEQ ID NO: 40938 - RNA, 10 nt, Homo sapiens
accugcaggc

SEQ ID NO: 40939 - RNA, 22 nt, Homo sapiens
accugcuguuuccuagcgcagc

SEQ ID NO: 40940 - RNA, 23 nt, Homo sapiens
accugcuguuuccuagcgcagcc

SEQ ID NO: 40941 - RNA, 24 nt, Homo sapiens
accugcuguuuccuagcgcagcca

SEQ ID NO: 40942 - RNA, 17 nt, Homo sapiens
accuguaaucccagcua

SEQ ID NO: 40943 - RNA, 14 nt, Homo sapiens
accuguccccgaaa

SEQ ID NO: 40944 - RNA, 15 nt, Homo sapiens
accuguucgcgcgcc

SEQ ID NO: 40945 - RNA, 16 nt, Homo sapiens
accuguucgcgcgccu

SEQ ID NO: 40946 - RNA, 21 nt, Homo sapiens
accuguugauagcaagugaau

SEQ ID NO: 40947 - RNA, 12 nt, Homo sapiens
accuuacuucuu

SEQ ID NO: 40948 - RNA, 15 nt, Homo sapiens
accuuacuucuucuc

SEQ ID NO: 40949 - RNA, 17 nt, Homo sapiens
accuuacuucuucucau

SEQ ID NO: 40950 - RNA, 22 nt, Homo sapiens
accuuacuucuucucauacuau

SEQ ID NO: 40951 - RNA, 13 nt, Homo sapiens
accuucccagcua

SEQ ID NO: 40952 - RNA, 20 nt, Homo sapiens
accuucccagcuagaauuca

SEQ ID NO: 40953 - RNA, 18 nt, Homo sapiens
accuucucaccugugaga

SEQ ID NO: 40954 - RNA, 22 nt, Homo sapiens
accuuuguauucucuccuguac

SEQ ID NO: 40955 - RNA, 13 nt, Homo sapiens
accuuuguuccca

SEQ ID NO: 40956 - RNA, 18 nt, Homo sapiens
accuuuuuuauacauaaa

SEQ ID NO: 40957 - RNA, 22 nt, Homo sapiens
acgagcaggcuacugucagcuc

SEQ ID NO: 40958 - RNA, 22 nt, Homo sapiens
acgaugggcuuucccaacagcu

SEQ ID NO: 40959 - RNA, 17 nt, Homo sapiens
acgccuguaaucccagc

SEQ ID NO: 40960 - RNA, 21 nt, Homo sapiens
acgccuguaaucccagcacuu

SEQ ID NO: 40961 - RNA, 14 nt, Homo sapiens
acgcgagcgcgcgc

SEQ ID NO: 40962 - RNA, 15 nt, Homo sapiens
acgcgagcgcgcgcg

SEQ ID NO: 40963 - RNA, 12 nt, Homo sapiens
acgcgcgcuccg

SEQ ID NO: 40964 - RNA, 18 nt, Homo sapiens
acgcgcgcuccgcgcagc

SEQ ID NO: 40965 - RNA, 16 nt, Homo sapiens
acgcucugggucgccg

SEQ ID NO: 40966 - RNA, 18 nt, Homo sapiens
acgcucugggucgccggc

SEQ ID NO: 40967 - RNA, 12 nt, Homo sapiens
acgcugcugccg

SEQ ID NO: 40968 - RNA, 13 nt, Homo sapiens
acgcugcugccgu

SEQ ID NO: 40969 - RNA, 13 nt, Homo sapiens
acggagccgggaa

SEQ ID NO: 40970 - RNA, 17 nt, Homo sapiens
acggcagggaaauguau

SEQ ID NO: 40971 - RNA, 12 nt, Homo sapiens
acggcuccggac

SEQ ID NO: 40972 - RNA, 14 nt, Homo sapiens
acggcuccggacgc

SEQ ID NO: 40973 - RNA, 15 nt, Homo sapiens
acggcuccggacgcu

SEQ ID NO: 40974 - RNA, 21 nt, Homo sapiens
acggcuccggacgcugcugcc

SEQ ID NO: 40975 - RNA, 14 nt, Homo sapiens
acggggugaaaccc

SEQ ID NO: 40976 - RNA, 15 nt, Homo sapiens
acgggguuugccaug

SEQ ID NO: 40977 - RNA, 23 nt, Homo sapiens
acgggguuugccaugcuggccag

SEQ ID NO: 40978 - RNA, 18 nt, Homo sapiens
acggucacuuuacugucc

SEQ ID NO: 40979 - RNA, 22 nt, Homo sapiens
acggucacuuuacuguccccau

SEQ ID NO: 40980 - RNA, 20 nt, Homo sapiens
acguauugcauuuaauuuau

SEQ ID NO: 40981 - RNA, 21 nt, Homo sapiens
acguauugcauuuaauuuauu

SEQ ID NO: 40982 - RNA, 20 nt, Homo sapiens
acgucccuagcccuuacguc

SEQ ID NO: 40983 - RNA, 13 nt, Homo sapiens
acgucuuaaauau

SEQ ID NO: 40984 - RNA, 18 nt, Homo sapiens
acgugacuggccugcugg

SEQ ID NO: 40985 - RNA, 19 nt, Homo sapiens
acgugacuggccugcugga

SEQ ID NO: 40986 - RNA, 21 nt, Homo sapiens
acgugacuggccugcuggaug

SEQ ID NO: 40987 - RNA, 18 nt, Homo sapiens
acgugauuuugcuguaga

SEQ ID NO: 40988 - RNA, 16 nt, Homo sapiens
acguguauauuuuuua

SEQ ID NO: 40989 - RNA, 13 nt, Homo sapiens
acguugugcauuu

SEQ ID NO: 40990 - RNA, 14 nt, Homo sapiens
acuaaaaaggcaug

SEQ ID NO: 40991 - RNA, 16 nt, Homo sapiens
acuaaaaauacaaaaa

SEQ ID NO: 40992 - RNA, 17 nt, Homo sapiens
acuaaacauguauguaa

SEQ ID NO: 40993 - RNA, 12 nt, Homo sapiens
acuaaacuuuca

SEQ ID NO: 40994 - RNA, 18 nt, Homo sapiens
acuaaauugacacuuaaa

SEQ ID NO: 40995 - RNA, 15 nt, Homo sapiens
acuaauaaaauacau

SEQ ID NO: 40996 - RNA, 16 nt, Homo sapiens
acuaauaaaauacaua

SEQ ID NO: 40997 - RNA, 17 nt, Homo sapiens
acuaaucaauacuuuga

SEQ ID NO: 40998 - RNA, 19 nt, Homo sapiens
acuaauguguaagacaaaa

SEQ ID NO: 40999 - RNA, 23 nt, Homo sapiens
acuaauuaggcaaggcuauguga

SEQ ID NO: 41000 - RNA, 13 nt, Homo sapiens
acuagauacugaa

SEQ ID NO: 41001 - RNA, 18 nt, Homo sapiens
acuagauacugaauguaa

SEQ ID NO: 41002 - RNA, 19 nt, Homo sapiens
acuagauacugaauguaaa

SEQ ID NO: 41003 - RNA, 13 nt, Homo sapiens
acuaggugcugca

SEQ ID NO: 41004 - RNA, 16 nt, Homo sapiens
acuaguuguaauuuuu

SEQ ID NO: 41005 - RNA, 11 nt, Homo sapiens
acuauaaaacu

SEQ ID NO: 41006 - RNA, 16 nt, Homo sapiens
acuauccaacuuauau

SEQ ID NO: 41007 - RNA, 16 nt, Homo sapiens
acuauccaguuacugc

SEQ ID NO: 41008 - RNA, 17 nt, Homo sapiens
acuauuauagaauggaa

SEQ ID NO: 41009 - RNA, 20 nt, Homo sapiens
acucaucaaucaaauaagua

SEQ ID NO: 41010 - RNA, 21 nt, Homo sapiens
acucaucaaucaaauaaguau

SEQ ID NO: 41011 - RNA, 14 nt, Homo sapiens
acucauccauuaau

SEQ ID NO: 41012 - RNA, 21 nt, Homo sapiens
acucauccauuaauguagaua

SEQ ID NO: 41013 - RNA, 14 nt, Homo sapiens
acucauuaaaugga

SEQ ID NO: 41014 - RNA, 22 nt, Homo sapiens
acucauuaaauggaaguaaaug

SEQ ID NO: 41015 - RNA, 18 nt, Homo sapiens
acucauugcaaccuccac

SEQ ID NO: 41016 - RNA, 15 nt, Homo sapiens
acucauuuauuucca

SEQ ID NO: 41017 - RNA, 23 nt, Homo sapiens
acucauuuuuguuuucauuaucu

SEQ ID NO: 41018 - RNA, 15 nt, Homo sapiens
acuccaaacugacuc

SEQ ID NO: 41019 - RNA, 17 nt, Homo sapiens
acuccaaacugacucuu

SEQ ID NO: 41020 - RNA, 12 nt, Homo sapiens
acuccacauccu

SEQ ID NO: 41021 - RNA, 13 nt, Homo sapiens
acuccacuuggac

SEQ ID NO: 41022 - RNA, 19 nt, Homo sapiens
acuccacuuggacaugggc

SEQ ID NO: 41023 - RNA, 23 nt, Homo sapiens
acuccagccugagcgacagugag

SEQ ID NO: 41024 - RNA, 16 nt, Homo sapiens
acuccuaguaauuuaa

SEQ ID NO: 41025 - RNA, 20 nt, Homo sapiens
acucuacagccaggcggcug

SEQ ID NO: 41026 - RNA, 14 nt, Homo sapiens
acucuaccugcaca

SEQ ID NO: 41027 - RNA, 23 nt, Homo sapiens
acucuauaaauaaaaccugacag

SEQ ID NO: 41028 - RNA, 23 nt, Homo sapiens
acucuauguucuaagaagugaaa

SEQ ID NO: 41029 - RNA, 13 nt, Homo sapiens
acucuuaagaaga

SEQ ID NO: 41030 - RNA, 19 nt, Homo sapiens
acucuuaggaagagaaacc

SEQ ID NO: 41031 - RNA, 15 nt, Homo sapiens
acucuuauaucuaua

SEQ ID NO: 41032 - RNA, 20 nt, Homo sapiens
acucuuauaucuauauuuua

SEQ ID NO: 41033 - RNA, 16 nt, Homo sapiens
acucuugauuguggga

SEQ ID NO: 41034 - RNA, 14 nt, Homo sapiens
acugaaaucauacu

SEQ ID NO: 41035 - RNA, 18 nt, Homo sapiens
acugaauguaaacaaagg

SEQ ID NO: 41036 - RNA, 16 nt, Homo sapiens
acugaauuaugaaacu

SEQ ID NO: 41037 - RNA, 12 nt, Homo sapiens
acugacucuuaa

SEQ ID NO: 41038 - RNA, 19 nt, Homo sapiens
acugagaugugaacacauc

SEQ ID NO: 41039 - RNA, 22 nt, Homo sapiens
acugaguacguugugcauuugg

SEQ ID NO: 41040 - RNA, 18 nt, Homo sapiens
acugauaugggucuugau

SEQ ID NO: 41041 - RNA, 15 nt, Homo sapiens
acugcacaucaaaau

SEQ ID NO: 41042 - RNA, 16 nt, Homo sapiens
acugcauacaaucuga

SEQ ID NO: 41043 - RNA, 17 nt, Homo sapiens
acugcauuauauuuauu

SEQ ID NO: 41044 - RNA, 18 nt, Homo sapiens
acugcauuauauuuauua

SEQ ID NO: 41045 - RNA, 17 nt, Homo sapiens
acugccaucauuuacuu

SEQ ID NO: 41046 - RNA, 17 nt, Homo sapiens
acugccgguuugaaaau

SEQ ID NO: 41047 - RNA, 15 nt, Homo sapiens
acugccuaucagcau

SEQ ID NO: 41048 - RNA, 17 nt, Homo sapiens
acugccuucucaacucc

SEQ ID NO: 41049 - RNA, 13 nt, Homo sapiens
acugcuuaacuuc

SEQ ID NO: 41050 - RNA, 13 nt, Homo sapiens
acuggccugcugg

SEQ ID NO: 41051 - RNA, 16 nt, Homo sapiens
acuggccugcuggaug

SEQ ID NO: 41052 - RNA, 23 nt, Homo sapiens
acuggcucccuggaagagaucaa

SEQ ID NO: 41053 - RNA, 20 nt, Homo sapiens
acuggcuguuaaucuuucaa

SEQ ID NO: 41054 - RNA, 17 nt, Homo sapiens
acugggguggguggggc

SEQ ID NO: 41055 - RNA, 15 nt, Homo sapiens
acuguaagaaaauau

SEQ ID NO: 41056 - RNA, 16 nt, Homo sapiens
acuguaauuugugaua

SEQ ID NO: 41057 - RNA, 12 nt, Homo sapiens
acuguacaugaa

SEQ ID NO: 41058 - RNA, 22 nt, Homo sapiens
acuguacccaaauggaaaguaa

SEQ ID NO: 41059 - RNA, 15 nt, Homo sapiens
acugucaauuuggca

SEQ ID NO: 41060 - RNA, 15 nt, Homo sapiens
acuguccauucuucc

SEQ ID NO: 41061 - RNA, 16 nt, Homo sapiens
acuguccccaucauca

SEQ ID NO: 41062 - RNA, 20 nt, Homo sapiens
acuguccuauuauauucauu

SEQ ID NO: 41063 - RNA, 18 nt, Homo sapiens
acuguuauuuauaaucac

SEQ ID NO: 41064 - RNA, 19 nt, Homo sapiens
acuguuauuuauaaucacu

SEQ ID NO: 41065 - RNA, 20 nt, Homo sapiens
acuguuauuuauaaucacuu

SEQ ID NO: 41066 - RNA, 19 nt, Homo sapiens
acuguuuggauaugagaug

SEQ ID NO: 41067 - RNA, 17 nt, Homo sapiens
acuuaaaaucuaauuca

SEQ ID NO: 41068 - RNA, 18 nt, Homo sapiens
acuuaaaaucuaauucaa

SEQ ID NO: 41069 - RNA, 11 nt, Homo sapiens
acuuacuguac

SEQ ID NO: 41070 - RNA, 14 nt, Homo sapiens
acuuacuguacaug

SEQ ID NO: 41071 - RNA, 16 nt, Homo sapiens
acuuacuuaguguuau

SEQ ID NO: 41072 - RNA, 16 nt, Homo sapiens
acuuaguguacaugaa

SEQ ID NO: 41073 - RNA, 17 nt, Homo sapiens
acuuaugaaccuuuaca

SEQ ID NO: 41074 - RNA, 18 nt, Homo sapiens
acuuaugaaccuuuacau

SEQ ID NO: 41075 - RNA, 22 nt, Homo sapiens
acuuauuguagcauccuggaau

SEQ ID NO: 41076 - RNA, 13 nt, Homo sapiens
acuucaaauccuu

SEQ ID NO: 41077 - RNA, 12 nt, Homo sapiens
acuucacuuuuu

SEQ ID NO: 41078 - RNA, 17 nt, Homo sapiens
acuucauuaauaauaaa

SEQ ID NO: 41079 - RNA, 22 nt, Homo sapiens
acuuccagggcuacgcgcgcuc

SEQ ID NO: 41080 - RNA, 18 nt, Homo sapiens
acuucccgcuguuccucg

SEQ ID NO: 41081 - RNA, 20 nt, Homo sapiens
acuucccgcuguuccucgcc

SEQ ID NO: 41082 - RNA, 13 nt, Homo sapiens
acuuccucccggc

SEQ ID NO: 41083 - RNA, 14 nt, Homo sapiens
acuuccucccggcc

SEQ ID NO: 41084 - RNA, 18 nt, Homo sapiens
acuuccucccggccgcgc

SEQ ID NO: 41085 - RNA, 19 nt, Homo sapiens
acuuccucccggccgcgcu

SEQ ID NO: 41086 - RNA, 22 nt, Homo sapiens
acuuccucccggccgcgcugcg

SEQ ID NO: 41087 - RNA, 23 nt, Homo sapiens
acuuccucccggccgcgcugcgc

SEQ ID NO: 41088 - RNA, 20 nt, Homo sapiens
acuucuaaguaaaaccacag

SEQ ID NO: 41089 - RNA, 21 nt, Homo sapiens
acuucugucuucacaacagau

SEQ ID NO: 41090 - RNA, 22 nt, Homo sapiens
acuucugucuucacaacagauu

SEQ ID NO: 41091 - RNA, 14 nt, Homo sapiens
acuucuuaggguua

SEQ ID NO: 41092 - RNA, 20 nt, Homo sapiens
acuucuucucauacuauuua

SEQ ID NO: 41093 - RNA, 20 nt, Homo sapiens
acuugaaugugucaggugac

SEQ ID NO: 41094 - RNA, 15 nt, Homo sapiens
acuugaugauacaau

SEQ ID NO: 41095 - RNA, 21 nt, Homo sapiens
acuuggacaugggccccagau

SEQ ID NO: 41096 - RNA, 14 nt, Homo sapiens
acuugggaggcuga

SEQ ID NO: 41097 - RNA, 14 nt, Homo sapiens
acuuuaacacagug

SEQ ID NO: 41098 - RNA, 20 nt, Homo sapiens
acuuuaacacagugucuggc

SEQ ID NO: 41099 - RNA, 20 nt, Homo sapiens
acuuuaccuuuuuuauacau

SEQ ID NO: 41100 - RNA, 13 nt, Homo sapiens
acuuuccaauaaa

SEQ ID NO: 41101 - RNA, 14 nt, Homo sapiens
acuuuccaauaaag

SEQ ID NO: 41102 - RNA, 12 nt, Homo sapiens
acuuuccagaga

SEQ ID NO: 41103 - RNA, 23 nt, Homo sapiens
acuuugaccucugcagcaauaaa

SEQ ID NO: 41104 - RNA, 20 nt, Homo sapiens
acuuugauuuuauaugcuau

SEQ ID NO: 41105 - RNA, 15 nt, Homo sapiens
acuuugggaggcuga

SEQ ID NO: 41106 - RNA, 16 nt, Homo sapiens
acuuuuaaacuuugau

SEQ ID NO: 41107 - RNA, 13 nt, Homo sapiens
acuuuuauaagaa

SEQ ID NO: 41108 - RNA, 19 nt, Homo sapiens
acuuuuggaagguauuuaa

SEQ ID NO: 41109 - RNA, 21 nt, Homo sapiens
acuuuuggaagguauuuaaua

SEQ ID NO: 41110 - RNA, 15 nt, Homo sapiens
acuuuuggcuuguaa

SEQ ID NO: 41111 - RNA, 16 nt, Homo sapiens
acuuuuguguaaugaa

SEQ ID NO: 41112 - RNA, 11 nt, Homo sapiens
acuuuuuccag

SEQ ID NO: 41113 - RNA, 13 nt, Homo sapiens
acuuuuugcagcu

SEQ ID NO: 41114 - RNA, 15 nt, Homo sapiens
acuuuuuuucuuuuc

SEQ ID NO: 41115 - RNA, 17 nt, Homo sapiens
agaaaaaggaugcacag

SEQ ID NO: 41116 - RNA, 20 nt, Homo sapiens
agaaaaguugaauuuuacau

SEQ ID NO: 41117 - RNA, 20 nt, Homo sapiens
agaaaauaguggugugauuu

SEQ ID NO: 41118 - RNA, 16 nt, Homo sapiens
agaaaauggccaguga

SEQ ID NO: 41119 - RNA, 14 nt, Homo sapiens
agaaacacaacuau

SEQ ID NO: 41120 - RNA, 12 nt, Homo sapiens
agaaacauuugg

SEQ ID NO: 41121 - RNA, 20 nt, Homo sapiens
agaaaccuuauuguaccucu

SEQ ID NO: 41122 - RNA, 14 nt, Homo sapiens
agaaagacuauuca

SEQ ID NO: 41123 - RNA, 23 nt, Homo sapiens
agaaagacuauucaaacagucuc

SEQ ID NO: 41124 - RNA, 21 nt, Homo sapiens
agaaaggacccucaagacaaa

SEQ ID NO: 41125 - RNA, 18 nt, Homo sapiens
agaaauaaaccuaugaau

SEQ ID NO: 41126 - RNA, 14 nt, Homo sapiens
agaaauguguuauc

SEQ ID NO: 41127 - RNA, 16 nt, Homo sapiens
agaaauuaaguaucug

SEQ ID NO: 41128 - RNA, 22 nt, Homo sapiens
agaaauuaaguaucugacaucu

SEQ ID NO: 41129 - RNA, 19 nt, Homo sapiens
agaaauuugccaauuuacu

SEQ ID NO: 41130 - RNA, 14 nt, Homo sapiens
agaacuugaaugug

SEQ ID NO: 41131 - RNA, 18 nt, Homo sapiens
agaagaaaauaguggugu

SEQ ID NO: 41132 - RNA, 16 nt, Homo sapiens
agaagaaugacuaugc

SEQ ID NO: 41133 - RNA, 15 nt, Homo sapiens
agaagacaacauuaa

SEQ ID NO: 41134 - RNA, 13 nt, Homo sapiens
agaagagccggag

SEQ ID NO: 41135 - RNA, 15 nt, Homo sapiens
agaagagccggagcc

SEQ ID NO: 41136 - RNA, 16 nt, Homo sapiens
agaagagccggagccu

SEQ ID NO: 41137 - RNA, 23 nt, Homo sapiens
agaagagccggagccuccagcug

SEQ ID NO: 41138 - RNA, 14 nt, Homo sapiens
agaagagcuguuca

SEQ ID NO: 41139 - RNA, 16 nt, Homo sapiens
agaagaugguaccacc

SEQ ID NO: 41140 - RNA, 17 nt, Homo sapiens
agaagaugguaccacca

SEQ ID NO: 41141 - RNA, 21 nt, Homo sapiens
agaagaugguaccaccagucu

SEQ ID NO: 41142 - RNA, 22 nt, Homo sapiens
agaagucaaggcuuagacccuc

SEQ ID NO: 41143 - RNA, 19 nt, Homo sapiens
agaaguuaagcaacaucua

SEQ ID NO: 41144 - RNA, 13 nt, Homo sapiens
agaauauauuucc

SEQ ID NO: 41145 - RNA, 23 nt, Homo sapiens
agaaugaccuggccgcagugagg

SEQ ID NO: 41146 - RNA, 21 nt, Homo sapiens
agaaugauuuuacggagauau

SEQ ID NO: 41147 - RNA, 13 nt, Homo sapiens
agaauggaacuca

SEQ ID NO: 41148 - RNA, 21 nt, Homo sapiens
agaauguuuucaaauguucuc

SEQ ID NO: 41149 - RNA, 15 nt, Homo sapiens
agaauuaacacauga

SEQ ID NO: 41150 - RNA, 15 nt, Homo sapiens
agaauucuuacaugu

SEQ ID NO: 41151 - RNA, 16 nt, Homo sapiens
agaauucuuacauguu

SEQ ID NO: 41152 - RNA, 21 nt, Homo sapiens
agaauuuauucaauuccucug

SEQ ID NO: 41153 - RNA, 17 nt, Homo sapiens
agacaagaaggaaagau

SEQ ID NO: 41154 - RNA, 11 nt, Homo sapiens
agacaccacca

SEQ ID NO: 41155 - RNA, 21 nt, Homo sapiens
agacaccaccacccuugccau

SEQ ID NO: 41156 - RNA, 22 nt, Homo sapiens
agacaccaccacccuugccaug

SEQ ID NO: 41157 - RNA, 14 nt, Homo sapiens
agacagaacuugaa

SEQ ID NO: 41158 - RNA, 17 nt, Homo sapiens
agacauacuaaccagca

SEQ ID NO: 41159 - RNA, 20 nt, Homo sapiens
agacauacuaaccagcagaa

SEQ ID NO: 41160 - RNA, 16 nt, Homo sapiens
agacccucaugcugcc

SEQ ID NO: 41161 - RNA, 20 nt, Homo sapiens
agacccucaugcugccaaua

SEQ ID NO: 41162 - RNA, 21 nt, Homo sapiens
agacccucaugcugccaauau

SEQ ID NO: 41163 - RNA, 22 nt, Homo sapiens
agaccuggucgucgucuugacu

SEQ ID NO: 41164 - RNA, 15 nt, Homo sapiens
agacgggguuugcca

SEQ ID NO: 41165 - RNA, 18 nt, Homo sapiens
agacgggguuugccaugc

SEQ ID NO: 41166 - RNA, 23 nt, Homo sapiens
agacgggguuugccaugcuggcc

SEQ ID NO: 41167 - RNA, 19 nt, Homo sapiens
agacgugauuuugcuguag

SEQ ID NO: 41168 - RNA, 13 nt, Homo sapiens
agacucugucuca

SEQ ID NO: 41169 - RNA, 14 nt, Homo sapiens
agacucugucucag

SEQ ID NO: 41170 - RNA, 15 nt, Homo sapiens
agacucugucucagu

SEQ ID NO: 41171 - RNA, 20 nt, Homo sapiens
agacugaguacguugugcau

SEQ ID NO: 41172 - RNA, 15 nt, Homo sapiens
agagaaaagacauaa

SEQ ID NO: 41173 - RNA, 15 nt, Homo sapiens
agagaaugagagaca

SEQ ID NO: 41174 - RNA, 16 nt, Homo sapiens
agagacagaaagcaga

SEQ ID NO: 41175 - RNA, 14 nt, Homo sapiens
agagaccacaagca

SEQ ID NO: 41176 - RNA, 17 nt, Homo sapiens
agagacgggguuugcca

SEQ ID NO: 41177 - RNA, 22 nt, Homo sapiens
agagacgggguuugccaugcug

SEQ ID NO: 41178 - RNA, 17 nt, Homo sapiens
agagccggagccuccag

SEQ ID NO: 41179 - RNA, 18 nt, Homo sapiens
agagccggagccuccagc

SEQ ID NO: 41180 - RNA, 21 nt, Homo sapiens
agaggaaugaaguacucauac

SEQ ID NO: 41181 - RNA, 17 nt, Homo sapiens
agaggagaaacuggaac

SEQ ID NO: 41182 - RNA, 12 nt, Homo sapiens
agaggcagcuug

SEQ ID NO: 41183 - RNA, 13 nt, Homo sapiens
agaggcagcuuga

SEQ ID NO: 41184 - RNA, 19 nt, Homo sapiens
agaggguguguaaguagau

SEQ ID NO: 41185 - RNA, 23 nt, Homo sapiens
agagucuauuuacggaacucaaa

SEQ ID NO: 41186 - RNA, 22 nt, Homo sapiens
agaguucugucacggucacuuu

SEQ ID NO: 41187 - RNA, 22 nt, Homo sapiens
agaguucugucuggacuuucca

SEQ ID NO: 41188 - RNA, 16 nt, Homo sapiens
agaguuguuacauuuu

SEQ ID NO: 41189 - RNA, 15 nt, Homo sapiens
agauacugaaauaaa

SEQ ID NO: 41190 - RNA, 20 nt, Homo sapiens
agauacugaaauaaacgucu

SEQ ID NO: 41191 - RNA, 11 nt, Homo sapiens
agauagcaggg

SEQ ID NO: 41192 - RNA, 17 nt, Homo sapiens
agauagguuaccaguaa

SEQ ID NO: 41193 - RNA, 23 nt, Homo sapiens
agauagguuaccaguaacggaac

SEQ ID NO: 41194 - RNA, 13 nt, Homo sapiens
agauaugaggcau

SEQ ID NO: 41195 - RNA, 23 nt, Homo sapiens
agauaugaggcauuugcagcugu

SEQ ID NO: 41196 - RNA, 14 nt, Homo sapiens
agauaugauucaaa

SEQ ID NO: 41197 - RNA, 21 nt, Homo sapiens
agauauuuugcuuugugauuu

SEQ ID NO: 41198 - RNA, 13 nt, Homo sapiens
agaucaagccauc

SEQ ID NO: 41199 - RNA, 21 nt, Homo sapiens
agaucaagccugccucaauca

SEQ ID NO: 41200 - RNA, 13 nt, Homo sapiens
agaucauugugaa

SEQ ID NO: 41201 - RNA, 12 nt, Homo sapiens
agauccuggaaa

SEQ ID NO: 41202 - RNA, 15 nt, Homo sapiens
agauccuggaaauca

SEQ ID NO: 41203 - RNA, 16 nt, Homo sapiens
agaucucuaacuucac

SEQ ID NO: 41204 - RNA, 20 nt, Homo sapiens
agaucugcaacuacuaucca

SEQ ID NO: 41205 - RNA, 21 nt, Homo sapiens
agauguagauaaacucagaaa

SEQ ID NO: 41206 - RNA, 21 nt, Homo sapiens
agauguagcaaauuccaauac

SEQ ID NO: 41207 - RNA, 17 nt, Homo sapiens
agaugugggcagugaug

SEQ ID NO: 41208 - RNA, 22 nt, Homo sapiens
agaugugggcagugaugucacu

SEQ ID NO: 41209 - RNA, 23 nt, Homo sapiens
agauucaaugccccugaauuuaa

SEQ ID NO: 41210 - RNA, 21 nt, Homo sapiens
agauuuaccacuuguguuuug

SEQ ID NO: 41211 - RNA, 16 nt, Homo sapiens
agauuucaugccuggu

SEQ ID NO: 41212 - RNA, 21 nt, Homo sapiens
agauuucuuuccauugugggc

SEQ ID NO: 41213 - RNA, 18 nt, Homo sapiens
agcaaauguuaugcauaa

SEQ ID NO: 41214 - RNA, 17 nt, Homo sapiens
agcaaauuccaauacau

SEQ ID NO: 41215 - RNA, 21 nt, Homo sapiens
agcaaauuccaauacauuauu

SEQ ID NO: 41216 - RNA, 18 nt, Homo sapiens
agcaacccaaauguucau

SEQ ID NO: 41217 - RNA, 17 nt, Homo sapiens
agcaaggagauuuacaa

SEQ ID NO: 41218 - RNA, 21 nt, Homo sapiens
agcaaguauuagaauaccaca

SEQ ID NO: 41219 - RNA, 21 nt, Homo sapiens
agcacagccucuuagaugcag

SEQ ID NO: 41220 - RNA, 15 nt, Homo sapiens
agcaccaaucaugaa

SEQ ID NO: 41221 - RNA, 13 nt, Homo sapiens
agcaccugcaggc

SEQ ID NO: 41222 - RNA, 21 nt, Homo sapiens
agcaccugcaggcgugaccug

SEQ ID NO: 41223 - RNA, 22 nt, Homo sapiens
agcaccugcaggcgugaccuga

SEQ ID NO: 41224 - RNA, 15 nt, Homo sapiens
agcacgauuucuguu

SEQ ID NO: 41225 - RNA, 22 nt, Homo sapiens
agcacuuucccucuuggugccu

SEQ ID NO: 41226 - RNA, 14 nt, Homo sapiens
agcagaaaugccuu

SEQ ID NO: 41227 - RNA, 14 nt, Homo sapiens
agcagaacagugau

SEQ ID NO: 41228 - RNA, 22 nt, Homo sapiens
agcagagacgggguuugccaug

SEQ ID NO: 41229 - RNA, 21 nt, Homo sapiens
agcagauuuaagauauguaac

SEQ ID NO: 41230 - RNA, 14 nt, Homo sapiens
agcagcucauaaau

SEQ ID NO: 41231 - RNA, 18 nt, Homo sapiens
agcaggauagagugggac

SEQ ID NO: 41232 - RNA, 14 nt, Homo sapiens
agcagggacuugaa

SEQ ID NO: 41233 - RNA, 15 nt, Homo sapiens
agcagggacuugaac

SEQ ID NO: 41234 - RNA, 20 nt, Homo sapiens
agcagucagaagaccugguc

SEQ ID NO: 41235 - RNA, 21 nt, Homo sapiens
agcauaccaacacgagcaggc

SEQ ID NO: 41236 - RNA, 20 nt, Homo sapiens
agcauaguaccucugcuauu

SEQ ID NO: 41237 - RNA, 15 nt, Homo sapiens
agcaucacaguuuug

SEQ ID NO: 41238 - RNA, 13 nt, Homo sapiens
agcauccuggaau

SEQ ID NO: 41239 - RNA, 12 nt, Homo sapiens
agcaucucagga

SEQ ID NO: 41240 - RNA, 15 nt, Homo sapiens
agcaucucaggagau

SEQ ID NO: 41241 - RNA, 16 nt, Homo sapiens
agcaucucugaacauu

SEQ ID NO: 41242 - RNA, 17 nt, Homo sapiens
agcauuguaaaugugcu

SEQ ID NO: 41243 - RNA, 22 nt, Homo sapiens
agcauuguaaaugugcuuuuaa

SEQ ID NO: 41244 - RNA, 23 nt, Homo sapiens
agccaaccugggggcuuuaggga

SEQ ID NO: 41245 - RNA, 16 nt, Homo sapiens
agccacuucacuuuuu

SEQ ID NO: 41246 - RNA, 16 nt, Homo sapiens
agccagacaucaacag

SEQ ID NO: 41247 - RNA, 14 nt, Homo sapiens
agccagacuggcac

SEQ ID NO: 41248 - RNA, 20 nt, Homo sapiens
agccagauuuuccugaaaac

SEQ ID NO: 41249 - RNA, 15 nt, Homo sapiens
agccagcacagccuc

SEQ ID NO: 41250 - RNA, 17 nt, Homo sapiens
agccagcacagccucuu

SEQ ID NO: 41251 - RNA, 16 nt, Homo sapiens
agccagcccucuucug

SEQ ID NO: 41252 - RNA, 16 nt, Homo sapiens
agccagccuugcuccu

SEQ ID NO: 41253 - RNA, 13 nt, Homo sapiens
agccaggcggcug

SEQ ID NO: 41254 - RNA, 18 nt, Homo sapiens
agcccacuggcucccugg

SEQ ID NO: 41255 - RNA, 14 nt, Homo sapiens
agccccaauucgau

SEQ ID NO: 41256 - RNA, 23 nt, Homo sapiens
agccccaggcggguccgggucgc

SEQ ID NO: 41257 - RNA, 21 nt, Homo sapiens
agcccccauuguggucacagg

SEQ ID NO: 41258 - RNA, 15 nt, Homo sapiens
agccccgggaguggc

SEQ ID NO: 41259 - RNA, 15 nt, Homo sapiens
agccccugggaccag

SEQ ID NO: 41260 - RNA, 17 nt, Homo sapiens
agccccuugggcagguc

SEQ ID NO: 41261 - RNA, 15 nt, Homo sapiens
agcccggaaacucca

SEQ ID NO: 41262 - RNA, 12 nt, Homo sapiens
agcccuacacca

SEQ ID NO: 41263 - RNA, 15 nt, Homo sapiens
agcccucuucugaca

SEQ ID NO: 41264 - RNA, 23 nt, Homo sapiens
agcccucuucugacacuaaaaca

SEQ ID NO: 41265 - RNA, 20 nt, Homo sapiens
agcccuucaugcauuugcac

SEQ ID NO: 41266 - RNA, 17 nt, Homo sapiens
agccggagccuccagcu

SEQ ID NO: 41267 - RNA, 19 nt, Homo sapiens
agccggagccuccagcugc

SEQ ID NO: 41268 - RNA, 20 nt, Homo sapiens
agccggagccuccagcugcc

SEQ ID NO: 41269 - RNA, 13 nt, Homo sapiens
agccgggaaagaa

SEQ ID NO: 41270 - RNA, 15 nt, Homo sapiens
agccgggaaagaaga

SEQ ID NO: 41271 - RNA, 17 nt, Homo sapiens
agccgggaaagaagagc

SEQ ID NO: 41272 - RNA, 19 nt, Homo sapiens
agccgggaaagaagagccg

SEQ ID NO: 41273 - RNA, 21 nt, Homo sapiens
agccgggaaagaagagccgga

SEQ ID NO: 41274 - RNA, 22 nt, Homo sapiens
agccgggaaagaagagccggag

SEQ ID NO: 41275 - RNA, 23 nt, Homo sapiens
agccgggaaagaagagccggagc

SEQ ID NO: 41276 - RNA, 17 nt, Homo sapiens
agccgguccuugcugca

SEQ ID NO: 41277 - RNA, 20 nt, Homo sapiens
agccgguccuugcugcaccu

SEQ ID NO: 41278 - RNA, 21 nt, Homo sapiens
agccgguccuugcugcaccug

SEQ ID NO: 41279 - RNA, 15 nt, Homo sapiens
agccuaguugaucag

SEQ ID NO: 41280 - RNA, 16 nt, Homo sapiens
agccuccagcugcccc

SEQ ID NO: 41281 - RNA, 17 nt, Homo sapiens
agccuccagcugccccg

SEQ ID NO: 41282 - RNA, 18 nt, Homo sapiens
agccuccagcugccccgg

SEQ ID NO: 41283 - RNA, 19 nt, Homo sapiens
agccugaaagaggaaugaa

SEQ ID NO: 41284 - RNA, 20 nt, Homo sapiens
agccugaaagaggaaugaag

SEQ ID NO: 41285 - RNA, 15 nt, Homo sapiens
agccuggucaacaug

SEQ ID NO: 41286 - RNA, 16 nt, Homo sapiens
agccuggucaacaugg

SEQ ID NO: 41287 - RNA, 19 nt, Homo sapiens
agccuugcuccuggcuggg

SEQ ID NO: 41288 - RNA, 20 nt, Homo sapiens
agccuugcuccuggcugggg

SEQ ID NO: 41289 - RNA, 16 nt, Homo sapiens
agccuuggauacucca

SEQ ID NO: 41290 - RNA, 22 nt, Homo sapiens
agccuuggauacuccauggggu

SEQ ID NO: 41291 - RNA, 23 nt, Homo sapiens
agccuuuguugcuaucaauccaa

SEQ ID NO: 41292 - RNA, 16 nt, Homo sapiens
agcgacagugagacuc

SEQ ID NO: 41293 - RNA, 18 nt, Homo sapiens
agcgaguacuucccgcug

SEQ ID NO: 41294 - RNA, 11 nt, Homo sapiens
agcgcgcgcgc

SEQ ID NO: 41295 - RNA, 15 nt, Homo sapiens
agcgcgcgcgcccuc

SEQ ID NO: 41296 - RNA, 23 nt, Homo sapiens
agcgcgcgcgcccucuggcugcu

SEQ ID NO: 41297 - RNA, 16 nt, Homo sapiens
agcggaccuucccagc

SEQ ID NO: 41298 - RNA, 13 nt, Homo sapiens
agcgguuuauaua

SEQ ID NO: 41299 - RNA, 23 nt, Homo sapiens
agcuaaaguaucuguauugcauu

SEQ ID NO: 41300 - RNA, 14 nt, Homo sapiens
agcuaagauauaau

SEQ ID NO: 41301 - RNA, 23 nt, Homo sapiens
agcuaaguugcaccaacuuugaa

SEQ ID NO: 41302 - RNA, 12 nt, Homo sapiens
agcuacaggccc

SEQ ID NO: 41303 - RNA, 14 nt, Homo sapiens
agcuacaggcccca

SEQ ID NO: 41304 - RNA, 15 nt, Homo sapiens
agcuacaggccccau

SEQ ID NO: 41305 - RNA, 17 nt, Homo sapiens
agcuacuuauuguagca

SEQ ID NO: 41306 - RNA, 23 nt, Homo sapiens
agcuagaaaacaggcaaauuccu

SEQ ID NO: 41307 - RNA, 13 nt, Homo sapiens
agcuagaauuuga

SEQ ID NO: 41308 - RNA, 23 nt, Homo sapiens
agcuaggggggucagccagcccu

SEQ ID NO: 41309 - RNA, 13 nt, Homo sapiens
agcucacuggugg

SEQ ID NO: 41310 - RNA, 13 nt, Homo sapiens
agcucaggcuggc

SEQ ID NO: 41311 - RNA, 14 nt, Homo sapiens
agcucaggcuggca

SEQ ID NO: 41312 - RNA, 20 nt, Homo sapiens
agcucaggcuggcaccgcug

SEQ ID NO: 41313 - RNA, 23 nt, Homo sapiens
agcucaggcuggcaccgcuguac

SEQ ID NO: 41314 - RNA, 22 nt, Homo sapiens
agcuccaccuuacuucuucuca

SEQ ID NO: 41315 - RNA, 13 nt, Homo sapiens
agcucgugggaca

SEQ ID NO: 41316 - RNA, 13 nt, Homo sapiens
agcucuaucccaa

SEQ ID NO: 41317 - RNA, 18 nt, Homo sapiens
agcucuaucccaaccucu

SEQ ID NO: 41318 - RNA, 22 nt, Homo sapiens
agcucuaucccaaccucuccca

SEQ ID NO: 41319 - RNA, 19 nt, Homo sapiens
agcucugcccauccugccc

SEQ ID NO: 41320 - RNA, 15 nt, Homo sapiens
agcugaauacauucu

SEQ ID NO: 41321 - RNA, 14 nt, Homo sapiens
agcugccccgggga

SEQ ID NO: 41322 - RNA, 15 nt, Homo sapiens
agcugccccggggag

SEQ ID NO: 41323 - RNA, 16 nt, Homo sapiens
agcugccccggggagg

SEQ ID NO: 41324 - RNA, 22 nt, Homo sapiens
agcugccccggggaggggcgcu

SEQ ID NO: 41325 - RNA, 23 nt, Homo sapiens
agcugccccggggaggggcgcuc

SEQ ID NO: 41326 - RNA, 20 nt, Homo sapiens
agcugccuccccagcucuau

SEQ ID NO: 41327 - RNA, 22 nt, Homo sapiens
agcugccuccccagcucuaucc

SEQ ID NO: 41328 - RNA, 14 nt, Homo sapiens
agcuguaugauucc

SEQ ID NO: 41329 - RNA, 14 nt, Homo sapiens
agcuguugagcugu

SEQ ID NO: 41330 - RNA, 16 nt, Homo sapiens
agcuguuuucccugac

SEQ ID NO: 41331 - RNA, 15 nt, Homo sapiens
agcuuauucacaaga

SEQ ID NO: 41332 - RNA, 18 nt, Homo sapiens
agcuuauugucuagugaa

SEQ ID NO: 41333 - RNA, 14 nt, Homo sapiens
agcuucucugugaa

SEQ ID NO: 41334 - RNA, 20 nt, Homo sapiens
agcuugaaacugagauguga

SEQ ID NO: 41335 - RNA, 19 nt, Homo sapiens
agcuugaaauagugucuga

SEQ ID NO: 41336 - RNA, 17 nt, Homo sapiens
agcuuucucuaguucaa

SEQ ID NO: 41337 - RNA, 12 nt, Homo sapiens
agcuuuuguaga

SEQ ID NO: 41338 - RNA, 13 nt, Homo sapiens
agcuuuuguagaa

SEQ ID NO: 41339 - RNA, 14 nt, Homo sapiens
agcuuuuguagaag

SEQ ID NO: 41340 - RNA, 20 nt, Homo sapiens
agcuuuuuucucugauacag

SEQ ID NO: 41341 - RNA, 17 nt, Homo sapiens
aggaaaaucugcacugu

SEQ ID NO: 41342 - RNA, 22 nt, Homo sapiens
aggaaacuggguuccugcaaug

SEQ ID NO: 41343 - RNA, 15 nt, Homo sapiens
aggaaagauuuuguu

SEQ ID NO: 41344 - RNA, 22 nt, Homo sapiens
aggaaaucaaauaugcaaagca

SEQ ID NO: 41345 - RNA, 16 nt, Homo sapiens
aggaacagaagaggaa

SEQ ID NO: 41346 - RNA, 19 nt, Homo sapiens
aggaaggaggaagcuuauu

SEQ ID NO: 41347 - RNA, 17 nt, Homo sapiens
aggaauacauaaaguau

SEQ ID NO: 41348 - RNA, 19 nt, Homo sapiens
aggaauacauaaaguaugu

SEQ ID NO: 41349 - RNA, 13 nt, Homo sapiens
aggaauauuugca

SEQ ID NO: 41350 - RNA, 21 nt, Homo sapiens
aggaauauuugcaagacauag

SEQ ID NO: 41351 - RNA, 13 nt, Homo sapiens
aggaauugaccca

SEQ ID NO: 41352 - RNA, 13 nt, Homo sapiens
aggacugaauuau

SEQ ID NO: 41353 - RNA, 19 nt, Homo sapiens
aggagaaacuggaacucuc

SEQ ID NO: 41354 - RNA, 21 nt, Homo sapiens
aggaggcauccaaaggcuccu

SEQ ID NO: 41355 - RNA, 14 nt, Homo sapiens
aggaggcccugccc

SEQ ID NO: 41356 - RNA, 13 nt, Homo sapiens
aggaggggcuucu

SEQ ID NO: 41357 - RNA, 22 nt, Homo sapiens
aggaguuccuaaccagccuggu

SEQ ID NO: 41358 - RNA, 13 nt, Homo sapiens
aggaguuuggcca

SEQ ID NO: 41359 - RNA, 15 nt, Homo sapiens
aggaguuuggccaga

SEQ ID NO: 41360 - RNA, 16 nt, Homo sapiens
aggaguuuggccagaa

SEQ ID NO: 41361 - RNA, 16 nt, Homo sapiens
aggaugcacagaguug

SEQ ID NO: 41362 - RNA, 13 nt, Homo sapiens
aggaugcccacgg

SEQ ID NO: 41363 - RNA, 21 nt, Homo sapiens
aggauggcaggaggcauccaa

SEQ ID NO: 41364 - RNA, 10 nt, Homo sapiens
aggaugguuc

SEQ ID NO: 41365 - RNA, 12 nt, Homo sapiens
aggaugguuccc

SEQ ID NO: 41366 - RNA, 15 nt, Homo sapiens
aggauuuaaguuuca

SEQ ID NO: 41367 - RNA, 17 nt, Homo sapiens
aggauuuuaugcuuuaa

SEQ ID NO: 41368 - RNA, 12 nt, Homo sapiens
aggcaagagaau

SEQ ID NO: 41369 - RNA, 18 nt, Homo sapiens
aggcacccccagaaugac

SEQ ID NO: 41370 - RNA, 20 nt, Homo sapiens
aggcacccccagaaugaccu

SEQ ID NO: 41371 - RNA, 17 nt, Homo sapiens
aggcagaagcaacccaa

SEQ ID NO: 41372 - RNA, 22 nt, Homo sapiens
aggcauccaaaggcuccugaga

SEQ ID NO: 41373 - RNA, 12 nt, Homo sapiens
aggcauguaauu

SEQ ID NO: 41374 - RNA, 18 nt, Homo sapiens
aggcauguaauugcuugu

SEQ ID NO: 41375 - RNA, 11 nt, Homo sapiens
aggcauucucu

SEQ ID NO: 41376 - RNA, 19 nt, Homo sapiens
aggcauuugcagcugugcc

SEQ ID NO: 41377 - RNA, 13 nt, Homo sapiens
aggcccccgggcc

SEQ ID NO: 41378 - RNA, 14 nt, Homo sapiens
aggcccccgggccg

SEQ ID NO: 41379 - RNA, 16 nt, Homo sapiens
aggcccccgggccgac

SEQ ID NO: 41380 - RNA, 19 nt, Homo sapiens
aggcccccgggccgacgga

SEQ ID NO: 41381 - RNA, 23 nt, Homo sapiens
aggcccccgggccgacggagccg

SEQ ID NO: 41382 - RNA, 16 nt, Homo sapiens
aggcccuagcauuucu

SEQ ID NO: 41383 - RNA, 10 nt, Homo sapiens
aggccgggcg

SEQ ID NO: 41384 - RNA, 12 nt, Homo sapiens
aggcggguccgg

SEQ ID NO: 41385 - RNA, 14 nt, Homo sapiens
aggcggguccgggu

SEQ ID NO: 41386 - RNA, 17 nt, Homo sapiens
aggcggguccgggucgc

SEQ ID NO: 41387 - RNA, 18 nt, Homo sapiens
aggcggguccgggucgca

SEQ ID NO: 41388 - RNA, 20 nt, Homo sapiens
aggcggguccgggucgcagg

SEQ ID NO: 41389 - RNA, 21 nt, Homo sapiens
aggcggguccgggucgcagga

SEQ ID NO: 41390 - RNA, 14 nt, Homo sapiens
aggcggguggauca

SEQ ID NO: 41391 - RNA, 15 nt, Homo sapiens
aggcggguggaucac

SEQ ID NO: 41392 - RNA, 20 nt, Homo sapiens
aggcggguggaucacuugag

SEQ ID NO: 41393 - RNA, 20 nt, Homo sapiens
aggcgugaccugacagccca

SEQ ID NO: 41394 - RNA, 15 nt, Homo sapiens
aggcgugagccacca

SEQ ID NO: 41395 - RNA, 17 nt, Homo sapiens
aggcuagaaccaccugc

SEQ ID NO: 41396 - RNA, 13 nt, Homo sapiens
aggcuccaaacug

SEQ ID NO: 41397 - RNA, 21 nt, Homo sapiens
aggcuggagugcaguggcgca

SEQ ID NO: 41398 - RNA, 14 nt, Homo sapiens
aggcuggcaccgcu

SEQ ID NO: 41399 - RNA, 13 nt, Homo sapiens
aggcuggucucga

SEQ ID NO: 41400 - RNA, 23 nt, Homo sapiens
aggcuggucucgaacugcuggau

SEQ ID NO: 41401 - RNA, 17 nt, Homo sapiens
aggcuuagacccucaug

SEQ ID NO: 41402 - RNA, 22 nt, Homo sapiens
aggcuuagacccucaugcugcc

SEQ ID NO: 41403 - RNA, 23 nt, Homo sapiens
aggcuuagacccucaugcugcca

SEQ ID NO: 41404 - RNA, 19 nt, Homo sapiens
agggaacugaacauuccag

SEQ ID NO: 41405 - RNA, 16 nt, Homo sapiens
agggaagggggaacau

SEQ ID NO: 41406 - RNA, 11 nt, Homo sapiens
agggaccugcu

SEQ ID NO: 41407 - RNA, 14 nt, Homo sapiens
agggaccugcuguu

SEQ ID NO: 41408 - RNA, 21 nt, Homo sapiens
agggagccgguccuugcugca

SEQ ID NO: 41409 - RNA, 16 nt, Homo sapiens
agggauuccccuaacc

SEQ ID NO: 41410 - RNA, 17 nt, Homo sapiens
agggccuggcugggagu

SEQ ID NO: 41411 - RNA, 15 nt, Homo sapiens
agggcgcggggcggg

SEQ ID NO: 41412 - RNA, 16 nt, Homo sapiens
agggcgcggggcgggg

SEQ ID NO: 41413 - RNA, 15 nt, Homo sapiens
agggcuacgcgcgcu

SEQ ID NO: 41414 - RNA, 16 nt, Homo sapiens
agggcuacgcgcgcuc

SEQ ID NO: 41415 - RNA, 17 nt, Homo sapiens
agggcuacgcgcgcucc

SEQ ID NO: 41416 - RNA, 18 nt, Homo sapiens
agggcuacgcgcgcuccg

SEQ ID NO: 41417 - RNA, 20 nt, Homo sapiens
agggcuacgcgcgcuccgcg

SEQ ID NO: 41418 - RNA, 21 nt, Homo sapiens
agggcuacgcgcgcuccgcgc

SEQ ID NO: 41419 - RNA, 14 nt, Homo sapiens
agggcuugaggacu

SEQ ID NO: 41420 - RNA, 20 nt, Homo sapiens
agggcuugugugcacauauc

SEQ ID NO: 41421 - RNA, 21 nt, Homo sapiens
agggcuugugugcacauaucc

SEQ ID NO: 41422 - RNA, 17 nt, Homo sapiens
aggggaaggcaacauac

SEQ ID NO: 41423 - RNA, 11 nt, Homo sapiens
aggggcgcucg

SEQ ID NO: 41424 - RNA, 12 nt, Homo sapiens
aggggcgcucgc

SEQ ID NO: 41425 - RNA, 17 nt, Homo sapiens
aggggcgcucgcuuccg

SEQ ID NO: 41426 - RNA, 18 nt, Homo sapiens
aggggcgcucgcuuccgc

SEQ ID NO: 41427 - RNA, 22 nt, Homo sapiens
aggggcgcucgcuuccgcaucc

SEQ ID NO: 41428 - RNA, 11 nt, Homo sapiens
aggggcggcgg

SEQ ID NO: 41429 - RNA, 13 nt, Homo sapiens
aggggcggcggcc

SEQ ID NO: 41430 - RNA, 14 nt, Homo sapiens
aggggcggcggccc

SEQ ID NO: 41431 - RNA, 20 nt, Homo sapiens
aggggcggcggcccugugcg

SEQ ID NO: 41432 - RNA, 15 nt, Homo sapiens
aggguacacugccuu

SEQ ID NO: 41433 - RNA, 22 nt, Homo sapiens
aggguccuuugggaaaggagaa

SEQ ID NO: 41434 - RNA, 21 nt, Homo sapiens
agggucucccucuguugccaa

SEQ ID NO: 41435 - RNA, 17 nt, Homo sapiens
aggguggguggggugag

SEQ ID NO: 41436 - RNA, 16 nt, Homo sapiens
agguaccuucucaccu

SEQ ID NO: 41437 - RNA, 18 nt, Homo sapiens
agguacugagagugaaca

SEQ ID NO: 41438 - RNA, 20 nt, Homo sapiens
agguagaauguuuucaaaug

SEQ ID NO: 41439 - RNA, 20 nt, Homo sapiens
agguauauaaauuuucccaa

SEQ ID NO: 41440 - RNA, 17 nt, Homo sapiens
agguauuuuaaucacca

SEQ ID NO: 41441 - RNA, 18 nt, Homo sapiens
agguauuuuaaucaccaa

SEQ ID NO: 41442 - RNA, 17 nt, Homo sapiens
aggucacacaaccuguc

SEQ ID NO: 41443 - RNA, 23 nt, Homo sapiens
agguccuggcaaagaugaucagu

SEQ ID NO: 41444 - RNA, 20 nt, Homo sapiens
aggucuaccaaaaaucucaa

SEQ ID NO: 41445 - RNA, 13 nt, Homo sapiens
aggucuccaaaau

SEQ ID NO: 41446 - RNA, 10 nt, Homo sapiens
aggugaccau

SEQ ID NO: 41447 - RNA, 18 nt, Homo sapiens
aggugagcaggugaugcc

SEQ ID NO: 41448 - RNA, 17 nt, Homo sapiens
aggugcuacaaaaacac

SEQ ID NO: 41449 - RNA, 13 nt, Homo sapiens
agguuaagcacuu

SEQ ID NO: 41450 - RNA, 15 nt, Homo sapiens
agguuaagcacuuua

SEQ ID NO: 41451 - RNA, 17 nt, Homo sapiens
agguuccugagcccuac

SEQ ID NO: 41452 - RNA, 19 nt, Homo sapiens
agguucuggugugaacuaa

SEQ ID NO: 41453 - RNA, 15 nt, Homo sapiens
agguuucgauauuua

SEQ ID NO: 41454 - RNA, 20 nt, Homo sapiens
agguuuggacaaaauggaau

SEQ ID NO: 41455 - RNA, 21 nt, Homo sapiens
agguuuuucuuaaauaauaaa

SEQ ID NO: 41456 - RNA, 13 nt, Homo sapiens
aguaaaaccacag

SEQ ID NO: 41457 - RNA, 18 nt, Homo sapiens
aguaaaaccacagcaguu

SEQ ID NO: 41458 - RNA, 14 nt, Homo sapiens
aguaauaugcacac

SEQ ID NO: 41459 - RNA, 12 nt, Homo sapiens
aguaaugauaac

SEQ ID NO: 41460 - RNA, 20 nt, Homo sapiens
aguaauuuuaaguaauuuca

SEQ ID NO: 41461 - RNA, 23 nt, Homo sapiens
aguacacuguuucaaacuuuacu

SEQ ID NO: 41462 - RNA, 14 nt, Homo sapiens
aguacagacuuuuu

SEQ ID NO: 41463 - RNA, 14 nt, Homo sapiens
aguacguugugcau

SEQ ID NO: 41464 - RNA, 16 nt, Homo sapiens
aguacguugugcauuu

SEQ ID NO: 41465 - RNA, 17 nt, Homo sapiens
aguacucauacauguua

SEQ ID NO: 41466 - RNA, 14 nt, Homo sapiens
aguacuucccgcug

SEQ ID NO: 41467 - RNA, 22 nt, Homo sapiens
aguacuucccgcuguuccucgc

SEQ ID NO: 41468 - RNA, 23 nt, Homo sapiens
aguacuucccgcuguuccucgcc

SEQ ID NO: 41469 - RNA, 18 nt, Homo sapiens
aguagauaugaggcauuu

SEQ ID NO: 41470 - RNA, 15 nt, Homo sapiens
aguagcagcagcauc

SEQ ID NO: 41471 - RNA, 16 nt, Homo sapiens
aguaucccuacuguaa

SEQ ID NO: 41472 - RNA, 19 nt, Homo sapiens
aguaucccuacuguaauuu

SEQ ID NO: 41473 - RNA, 23 nt, Homo sapiens
aguaugaaaaugucauuguucuu

SEQ ID NO: 41474 - RNA, 19 nt, Homo sapiens
aguaugcacuaaucaauac

SEQ ID NO: 41475 - RNA, 13 nt, Homo sapiens
aguaugugcauau

SEQ ID NO: 41476 - RNA, 14 nt, Homo sapiens
aguaugugcauuua

SEQ ID NO: 41477 - RNA, 15 nt, Homo sapiens
aguaugugcauuuaa

SEQ ID NO: 41478 - RNA, 13 nt, Homo sapiens
aguauuucuauga

SEQ ID NO: 41479 - RNA, 18 nt, Homo sapiens
aguauuucuaugaaauau

SEQ ID NO: 41480 - RNA, 22 nt, Homo sapiens
agucaaggcuuagacccucaug

SEQ ID NO: 41481 - RNA, 15 nt, Homo sapiens
agucaccucauggaa

SEQ ID NO: 41482 - RNA, 15 nt, Homo sapiens
agucagaagaccugg

SEQ ID NO: 41483 - RNA, 21 nt, Homo sapiens
agucccagaucaagccugccu

SEQ ID NO: 41484 - RNA, 22 nt, Homo sapiens
agucccagaucaagccugccuc

SEQ ID NO: 41485 - RNA, 11 nt, Homo sapiens
agucccugcug

SEQ ID NO: 41486 - RNA, 12 nt, Homo sapiens
agucccugcugc

SEQ ID NO: 41487 - RNA, 15 nt, Homo sapiens
agucccugcugcccu

SEQ ID NO: 41488 - RNA, 16 nt, Homo sapiens
agucccugcugcccuu

SEQ ID NO: 41489 - RNA, 16 nt, Homo sapiens
agucucaggaaaucaa

SEQ ID NO: 41490 - RNA, 16 nt, Homo sapiens
agucucuaucauuaaa

SEQ ID NO: 41491 - RNA, 18 nt, Homo sapiens
agucucuaucauuaaagu

SEQ ID NO: 41492 - RNA, 22 nt, Homo sapiens
agucucugaagugaaacugcuu

SEQ ID NO: 41493 - RNA, 17 nt, Homo sapiens
agucuguuuuaugacuu

SEQ ID NO: 41494 - RNA, 13 nt, Homo sapiens
agucuucuauuua

SEQ ID NO: 41495 - RNA, 14 nt, Homo sapiens
agucuucuauuuau

SEQ ID NO: 41496 - RNA, 12 nt, Homo sapiens
agugaaacugcu

SEQ ID NO: 41497 - RNA, 13 nt, Homo sapiens
agugaaacugcuu

SEQ ID NO: 41498 - RNA, 19 nt, Homo sapiens
agugaacaaauuuacagag

SEQ ID NO: 41499 - RNA, 20 nt, Homo sapiens
agugacaagcucacagaccu

SEQ ID NO: 41500 - RNA, 16 nt, Homo sapiens
agugagacucugucuc

SEQ ID NO: 41501 - RNA, 15 nt, Homo sapiens
agugagcugauauca

SEQ ID NO: 41502 - RNA, 19 nt, Homo sapiens
agugaucaaguuauuuuua

SEQ ID NO: 41503 - RNA, 21 nt, Homo sapiens
agugaucaaguuauuuuuaau

SEQ ID NO: 41504 - RNA, 15 nt, Homo sapiens
agugcaguggcgcaa

SEQ ID NO: 41505 - RNA, 17 nt, Homo sapiens
agugcccaacuguuaua

SEQ ID NO: 41506 - RNA, 12 nt, Homo sapiens
agugcugcauuu

SEQ ID NO: 41507 - RNA, 13 nt, Homo sapiens
agugcugcauuua

SEQ ID NO: 41508 - RNA, 16 nt, Homo sapiens
agugcugcauuuaaaa

SEQ ID NO: 41509 - RNA, 22 nt, Homo sapiens
agugcugggaauuacaggcgug

SEQ ID NO: 41510 - RNA, 14 nt, Homo sapiens
agugcuuggcccag

SEQ ID NO: 41511 - RNA, 17 nt, Homo sapiens
agugcuuggcccaggag

SEQ ID NO: 41512 - RNA, 22 nt, Homo sapiens
agugcuuugagauugugaaauu

SEQ ID NO: 41513 - RNA, 19 nt, Homo sapiens
aguggcauguaugacguga

SEQ ID NO: 41514 - RNA, 18 nt, Homo sapiens
aguggcgcgcgccaccac

SEQ ID NO: 41515 - RNA, 20 nt, Homo sapiens
aguggcgcgcgccaccacgc

SEQ ID NO: 41516 - RNA, 14 nt, Homo sapiens
agugggacaguucc

SEQ ID NO: 41517 - RNA, 23 nt, Homo sapiens
agugguuauuuagggaacugcuu

SEQ ID NO: 41518 - RNA, 15 nt, Homo sapiens
agugugaggaaaacc

SEQ ID NO: 41519 - RNA, 23 nt, Homo sapiens
aguguguggucaacauuucucau

SEQ ID NO: 41520 - RNA, 23 nt, Homo sapiens
aguguuggagaagaacugaaauc

SEQ ID NO: 41521 - RNA, 11 nt, Homo sapiens
aguuaagaauc

SEQ ID NO: 41522 - RNA, 20 nt, Homo sapiens
aguuaggcuauucacaacca

SEQ ID NO: 41523 - RNA, 11 nt, Homo sapiens
aguuauaaaaa

SEQ ID NO: 41524 - RNA, 19 nt, Homo sapiens
aguuauggcuauaggugcu

SEQ ID NO: 41525 - RNA, 14 nt, Homo sapiens
aguuauuuuuaaac

SEQ ID NO: 41526 - RNA, 15 nt, Homo sapiens
aguucaauccugauu

SEQ ID NO: 41527 - RNA, 21 nt, Homo sapiens
aguucaaucuggauucauauu

SEQ ID NO: 41528 - RNA, 21 nt, Homo sapiens
aguucugaagaagaugguacc

SEQ ID NO: 41529 - RNA, 18 nt, Homo sapiens
aguucuucaaagauaggg

SEQ ID NO: 41530 - RNA, 12 nt, Homo sapiens
aguugaucagcu

SEQ ID NO: 41531 - RNA, 18 nt, Homo sapiens
aguugauuuuacaauuga

SEQ ID NO: 41532 - RNA, 18 nt, Homo sapiens
aguugcagcccugcugcu

SEQ ID NO: 41533 - RNA, 15 nt, Homo sapiens
aguugcagugagcug

SEQ ID NO: 41534 - RNA, 16 nt, Homo sapiens
aguugcagugagcuga

SEQ ID NO: 41535 - RNA, 11 nt, Homo sapiens
aguugcuguau

SEQ ID NO: 41536 - RNA, 15 nt, Homo sapiens
aguuguuaauaaaag

SEQ ID NO: 41537 - RNA, 17 nt, Homo sapiens
aguuuauauacaauuau

SEQ ID NO: 41538 - RNA, 18 nt, Homo sapiens
aguuuaugcauacaguaa

SEQ ID NO: 41539 - RNA, 17 nt, Homo sapiens
aguuuuacaguguuucu

SEQ ID NO: 41540 - RNA, 13 nt, Homo sapiens
aguuuuauaugcu

SEQ ID NO: 41541 - RNA, 17 nt, Homo sapiens
aguuuuauaugcuucug

SEQ ID NO: 41542 - RNA, 20 nt, Homo sapiens
aguuuucugcuuuaauuuca

SEQ ID NO: 41543 - RNA, 22 nt, Homo sapiens
aguuuuuauggcuuuugugcau

SEQ ID NO: 41544 - RNA, 16 nt, Homo sapiens
auaaaaaggugaccau

SEQ ID NO: 41545 - RNA, 14 nt, Homo sapiens
auaaaauaauuuuu

SEQ ID NO: 41546 - RNA, 19 nt, Homo sapiens
auaaaauaauuuuuauauu

SEQ ID NO: 41547 - RNA, 16 nt, Homo sapiens
auaaaauacauacuau

SEQ ID NO: 41548 - RNA, 12 nt, Homo sapiens
auaaaauauuua

SEQ ID NO: 41549 - RNA, 14 nt, Homo sapiens
auaaaauauuuaaa

SEQ ID NO: 41550 - RNA, 16 nt, Homo sapiens
auaaaauucauuccau

SEQ ID NO: 41551 - RNA, 19 nt, Homo sapiens
auaaacaagaccacguuuc

SEQ ID NO: 41552 - RNA, 18 nt, Homo sapiens
auaaacagcaacuugugu

SEQ ID NO: 41553 - RNA, 18 nt, Homo sapiens
auaaacaguagugauagu

SEQ ID NO: 41554 - RNA, 20 nt, Homo sapiens
auaaaccuaugaauaaauuu

SEQ ID NO: 41555 - RNA, 15 nt, Homo sapiens
auaaaguaugugcau

SEQ ID NO: 41556 - RNA, 18 nt, Homo sapiens
auaaaguguaaguucaca

SEQ ID NO: 41557 - RNA, 21 nt, Homo sapiens
auaaauaguuuaugauuccac

SEQ ID NO: 41558 - RNA, 22 nt, Homo sapiens
auaaaucgcuuuugauaaucaa

SEQ ID NO: 41559 - RNA, 23 nt, Homo sapiens
auaaaucgcuuuugauaaucaac

SEQ ID NO: 41560 - RNA, 14 nt, Homo sapiens
auaaauggacaaau

SEQ ID NO: 41561 - RNA, 20 nt, Homo sapiens
auaaauguugacaugggaca

SEQ ID NO: 41562 - RNA, 14 nt, Homo sapiens
auaaauuugguucu

SEQ ID NO: 41563 - RNA, 13 nt, Homo sapiens
auaaauuuuccca

SEQ ID NO: 41564 - RNA, 14 nt, Homo sapiens
auaaauuuucccaa

SEQ ID NO: 41565 - RNA, 21 nt, Homo sapiens
auaaauuuucuucuugguucu

SEQ ID NO: 41566 - RNA, 23 nt, Homo sapiens
auaacuggaaacuucagcgguuu

SEQ ID NO: 41567 - RNA, 16 nt, Homo sapiens
auaacuguuauuuaua

SEQ ID NO: 41568 - RNA, 13 nt, Homo sapiens
auaagaauucugu

SEQ ID NO: 41569 - RNA, 15 nt, Homo sapiens
auaagcuguuuuuau

SEQ ID NO: 41570 - RNA, 16 nt, Homo sapiens
auaauaaaauucauuc

SEQ ID NO: 41571 - RNA, 17 nt, Homo sapiens
auaauaaaauucauucc

SEQ ID NO: 41572 - RNA, 19 nt, Homo sapiens
auaauaaaauucauuccau

SEQ ID NO: 41573 - RNA, 17 nt, Homo sapiens
auaauaaagaucaugua

SEQ ID NO: 41574 - RNA, 23 nt, Homo sapiens
auaauagguuugugacuuuccua

SEQ ID NO: 41575 - RNA, 20 nt, Homo sapiens
auaauaugcacacagugcuu

SEQ ID NO: 41576 - RNA, 14 nt, Homo sapiens
auaaucaacugggc

SEQ ID NO: 41577 - RNA, 13 nt, Homo sapiens
auaaucacuuuuu

SEQ ID NO: 41578 - RNA, 21 nt, Homo sapiens
auaaugcgugcauaccacuuu

SEQ ID NO: 41579 - RNA, 22 nt, Homo sapiens
auaaugcgugcauaccacuuuu

SEQ ID NO: 41580 - RNA, 16 nt, Homo sapiens
auaauguagcagcuca

SEQ ID NO: 41581 - RNA, 19 nt, Homo sapiens
auaauuaaggguaugauua

SEQ ID NO: 41582 - RNA, 20 nt, Homo sapiens
auaauuaaggguaugauuaa

SEQ ID NO: 41583 - RNA, 23 nt, Homo sapiens
auaauuccuauauccugugacug

SEQ ID NO: 41584 - RNA, 14 nt, Homo sapiens
auaauuuuuauauu

SEQ ID NO: 41585 - RNA, 18 nt, Homo sapiens
auacaaaaauuagccggg

SEQ ID NO: 41586 - RNA, 20 nt, Homo sapiens
auacaaaaauuagccgggca

SEQ ID NO: 41587 - RNA, 13 nt, Homo sapiens
auacaaucaucaa

SEQ ID NO: 41588 - RNA, 15 nt, Homo sapiens
auacaaucaucaacc

SEQ ID NO: 41589 - RNA, 12 nt, Homo sapiens
auacagugucuu

SEQ ID NO: 41590 - RNA, 21 nt, Homo sapiens
auacauaaacaagaccacguu

SEQ ID NO: 41591 - RNA, 14 nt, Homo sapiens
auacauaaaguaug

SEQ ID NO: 41592 - RNA, 17 nt, Homo sapiens
auacauacuauagauuc

SEQ ID NO: 41593 - RNA, 14 nt, Homo sapiens
auaccuaucaucuu

SEQ ID NO: 41594 - RNA, 21 nt, Homo sapiens
auaccucaacccccauuucua

SEQ ID NO: 41595 - RNA, 19 nt, Homo sapiens
auaccucucuuguagcucu

SEQ ID NO: 41596 - RNA, 18 nt, Homo sapiens
auacgugggcauucaaau

SEQ ID NO: 41597 - RNA, 16 nt, Homo sapiens
auacuauccaguuacu

SEQ ID NO: 41598 - RNA, 13 nt, Homo sapiens
auacuauuuaauu

SEQ ID NO: 41599 - RNA, 20 nt, Homo sapiens
auacuauuuaauuauuucac

SEQ ID NO: 41600 - RNA, 14 nt, Homo sapiens
auacuccuaguaau

SEQ ID NO: 41601 - RNA, 18 nt, Homo sapiens
auacuguauuuuuaccuu

SEQ ID NO: 41602 - RNA, 12 nt, Homo sapiens
auacuguuugag

SEQ ID NO: 41603 - RNA, 12 nt, Homo sapiens
auagaauuaaca

SEQ ID NO: 41604 - RNA, 16 nt, Homo sapiens
auagacaauuuauuau

SEQ ID NO: 41605 - RNA, 21 nt, Homo sapiens
auagcagcuuauucacaagac

SEQ ID NO: 41606 - RNA, 13 nt, Homo sapiens
auagcaucucagg

SEQ ID NO: 41607 - RNA, 23 nt, Homo sapiens
auagccagguaccuucucaccug

SEQ ID NO: 41608 - RNA, 16 nt, Homo sapiens
auagcugacccagccc

SEQ ID NO: 41609 - RNA, 19 nt, Homo sapiens
auaggugcuacaaaaacac

SEQ ID NO: 41610 - RNA, 15 nt, Homo sapiens
auagguuaccaguaa

SEQ ID NO: 41611 - RNA, 16 nt, Homo sapiens
auaguaccucugcuau

SEQ ID NO: 41612 - RNA, 17 nt, Homo sapiens
auaguaccucugcuauu

SEQ ID NO: 41613 - RNA, 15 nt, Homo sapiens
auaguggugugauuu

SEQ ID NO: 41614 - RNA, 10 nt, Homo sapiens
auagugucuu

SEQ ID NO: 41615 - RNA, 14 nt, Homo sapiens
auaguucuacucca

SEQ ID NO: 41616 - RNA, 21 nt, Homo sapiens
auaguucuacuccauuaaaua

SEQ ID NO: 41617 - RNA, 18 nt, Homo sapiens
auaguuuaugauuccacc

SEQ ID NO: 41618 - RNA, 17 nt, Homo sapiens
auauaaauuuucccaaa

SEQ ID NO: 41619 - RNA, 14 nt, Homo sapiens
auauaauaugcaca

SEQ ID NO: 41620 - RNA, 19 nt, Homo sapiens
auauaguuacccaaauuaa

SEQ ID NO: 41621 - RNA, 13 nt, Homo sapiens
auauauacuauau

SEQ ID NO: 41622 - RNA, 17 nt, Homo sapiens
auauaugugaugaucua

SEQ ID NO: 41623 - RNA, 16 nt, Homo sapiens
auauauuuccuuauuc

SEQ ID NO: 41624 - RNA, 19 nt, Homo sapiens
auauauuuccuuauucaga

SEQ ID NO: 41625 - RNA, 12 nt, Homo sapiens
auauauuuuaga

SEQ ID NO: 41626 - RNA, 18 nt, Homo sapiens
auauauuuuuuuuuuuaa

SEQ ID NO: 41627 - RNA, 17 nt, Homo sapiens
auaucacaugucagcca

SEQ ID NO: 41628 - RNA, 18 nt, Homo sapiens
auaucaguccucuuucaa

SEQ ID NO: 41629 - RNA, 17 nt, Homo sapiens
auaucaguuauuuuuaa

SEQ ID NO: 41630 - RNA, 23 nt, Homo sapiens
auaucaugccccuguacuccagc

SEQ ID NO: 41631 - RNA, 14 nt, Homo sapiens
auauccugugacug

SEQ ID NO: 41632 - RNA, 15 nt, Homo sapiens
auauccugugacugu

SEQ ID NO: 41633 - RNA, 15 nt, Homo sapiens
auauccuuagcccau

SEQ ID NO: 41634 - RNA, 16 nt, Homo sapiens
auaucuuaucuuccua

SEQ ID NO: 41635 - RNA, 16 nt, Homo sapiens
auaugacacaucucug

SEQ ID NO: 41636 - RNA, 18 nt, Homo sapiens
auaugaggcauuugcagc

SEQ ID NO: 41637 - RNA, 15 nt, Homo sapiens
auaugauucaaaugu

SEQ ID NO: 41638 - RNA, 14 nt, Homo sapiens
auaugcaaagcacu

SEQ ID NO: 41639 - RNA, 17 nt, Homo sapiens
auaugccugcaaucuga

SEQ ID NO: 41640 - RNA, 15 nt, Homo sapiens
auaugcuauuuauua

SEQ ID NO: 41641 - RNA, 16 nt, Homo sapiens
auaugcuauuuauuaa

SEQ ID NO: 41642 - RNA, 21 nt, Homo sapiens
auaugcuucuguuuuauaauu

SEQ ID NO: 41643 - RNA, 15 nt, Homo sapiens
auauguaacaacaau

SEQ ID NO: 41644 - RNA, 15 nt, Homo sapiens
auauuaaaaucacaa

SEQ ID NO: 41645 - RNA, 24 nt, Homo sapiens
auauuaaaaucacaaacucaucca

SEQ ID NO: 41646 - RNA, 16 nt, Homo sapiens
auauuauguuaaaacu

SEQ ID NO: 41647 - RNA, 19 nt, Homo sapiens
auauuauuuugaauccaga

SEQ ID NO: 41648 - RNA, 23 nt, Homo sapiens
auauucucacagcuccaagaauu

SEQ ID NO: 41649 - RNA, 14 nt, Homo sapiens
auauucucuaguca

SEQ ID NO: 41650 - RNA, 21 nt, Homo sapiens
auauuguugacaacugugacu

SEQ ID NO: 41651 - RNA, 22 nt, Homo sapiens
auauuuauuacuguaagaaaau

SEQ ID NO: 41652 - RNA, 13 nt, Homo sapiens
auauuuauuuuaa

SEQ ID NO: 41653 - RNA, 21 nt, Homo sapiens
auauuucagauaaucacaaua

SEQ ID NO: 41654 - RNA, 22 nt, Homo sapiens
auauuuccaagaaauauuccuu

SEQ ID NO: 41655 - RNA, 23 nt, Homo sapiens
auauuuccuuauucagaauuucu

SEQ ID NO: 41656 - RNA, 13 nt, Homo sapiens
auauuugaaauau

SEQ ID NO: 41657 - RNA, 22 nt, Homo sapiens
auauuuguaucacaaaucuuaa

SEQ ID NO: 41658 - RNA, 15 nt, Homo sapiens
auauuuuauguguaa

SEQ ID NO: 41659 - RNA, 19 nt, Homo sapiens
auauuuuauuauagucacu

SEQ ID NO: 41660 - RNA, 19 nt, Homo sapiens
auauuuugcuuugugauuu

SEQ ID NO: 41661 - RNA, 23 nt, Homo sapiens
auauuuuuuaugaaacauuacag

SEQ ID NO: 41662 - RNA, 21 nt, Homo sapiens
auauuuuuuguuaaaugauuu

SEQ ID NO: 41663 - RNA, 10 nt, Homo sapiens
auauuuuuuu

SEQ ID NO: 41664 - RNA, 18 nt, Homo sapiens
auauuuuuuucugaaauu

SEQ ID NO: 41665 - RNA, 22 nt, Homo sapiens
auauuuuuuucugaaauuuccu

SEQ ID NO: 41666 - RNA, 18 nt, Homo sapiens
auauuuuuuuuuuuaaaa

SEQ ID NO: 41667 - RNA, 13 nt, Homo sapiens
aucaaaagaaaga

SEQ ID NO: 41668 - RNA, 18 nt, Homo sapiens
aucaaauaugcaaagcac

SEQ ID NO: 41669 - RNA, 20 nt, Homo sapiens
aucaaauaugcaaagcacug

SEQ ID NO: 41670 - RNA, 17 nt, Homo sapiens
aucaaauuccagaauga

SEQ ID NO: 41671 - RNA, 14 nt, Homo sapiens
aucaaccaaaugga

SEQ ID NO: 41672 - RNA, 9 nt, Homo sapiens
aucaauauc

SEQ ID NO: 41673 - RNA, 15 nt, Homo sapiens
aucaauccaagaacu

SEQ ID NO: 41674 - RNA, 13 nt, Homo sapiens
aucaaugaaugaa

SEQ ID NO: 41675 - RNA, 23 nt, Homo sapiens
aucaauucuauuacgugcaauac

SEQ ID NO: 41676 - RNA, 16 nt, Homo sapiens
aucacaaacucaucca

SEQ ID NO: 41677 - RNA, 23 nt, Homo sapiens
aucacagcuacuugggaggcuga

SEQ ID NO: 41678 - RNA, 23 nt, Homo sapiens
aucaccaucaauuuuaguuguca

SEQ ID NO: 41679 - RNA, 13 nt, Homo sapiens
aucacccagaaga

SEQ ID NO: 41680 - RNA, 14 nt, Homo sapiens
aucacccagaagaa

SEQ ID NO: 41681 - RNA, 15 nt, Homo sapiens
aucacccagaagaaa

SEQ ID NO: 41682 - RNA, 14 nt, Homo sapiens
aucacucauuuauu

SEQ ID NO: 41683 - RNA, 18 nt, Homo sapiens
aucacucauuuauuucca

SEQ ID NO: 41684 - RNA, 19 nt, Homo sapiens
aucacucauuuauuuccau

SEQ ID NO: 41685 - RNA, 14 nt, Homo sapiens
aucacuugaacccg

SEQ ID NO: 41686 - RNA, 17 nt, Homo sapiens
aucagcauuuuacuacu

SEQ ID NO: 41687 - RNA, 15 nt, Homo sapiens
aucagcuaaguugca

SEQ ID NO: 41688 - RNA, 13 nt, Homo sapiens
aucaggacgagaa

SEQ ID NO: 41689 - RNA, 17 nt, Homo sapiens
aucaguaugaaaauguc

SEQ ID NO: 41690 - RNA, 13 nt, Homo sapiens
aucaguccaaagg

SEQ ID NO: 41691 - RNA, 14 nt, Homo sapiens
aucaguuacucuga

SEQ ID NO: 41692 - RNA, 21 nt, Homo sapiens
aucaguuacucugaagggcau

SEQ ID NO: 41693 - RNA, 16 nt, Homo sapiens
aucaguuauuuuuaaa

SEQ ID NO: 41694 - RNA, 18 nt, Homo sapiens
aucaguuauuuuuaaacu

SEQ ID NO: 41695 - RNA, 23 nt, Homo sapiens
aucauacuucuuaggguuaugau

SEQ ID NO: 41696 - RNA, 14 nt, Homo sapiens
aucauaugggauac

SEQ ID NO: 41697 - RNA, 19 nt, Homo sapiens
aucaugcaaaugcuguauu

SEQ ID NO: 41698 - RNA, 12 nt, Homo sapiens
aucauuuacuuu

SEQ ID NO: 41699 - RNA, 23 nt, Homo sapiens
aucauuuacuuuuaaacuuugau

SEQ ID NO: 41700 - RNA, 18 nt, Homo sapiens
aucauuucugcaucagcu

SEQ ID NO: 41701 - RNA, 13 nt, Homo sapiens
auccaaagcugaa

SEQ ID NO: 41702 - RNA, 19 nt, Homo sapiens
auccaaagcugaauacauu

SEQ ID NO: 41703 - RNA, 19 nt, Homo sapiens
auccaacuuauauuucugc

SEQ ID NO: 41704 - RNA, 21 nt, Homo sapiens
auccaacuuauauuucugcuu

SEQ ID NO: 41705 - RNA, 19 nt, Homo sapiens
auccagauagguuaccagu

SEQ ID NO: 41706 - RNA, 20 nt, Homo sapiens
aucccagcuacuugggaggc

SEQ ID NO: 41707 - RNA, 21 nt, Homo sapiens
aucccagcuacuugggaggcu

SEQ ID NO: 41708 - RNA, 12 nt, Homo sapiens
aucccggccggc

SEQ ID NO: 41709 - RNA, 13 nt, Homo sapiens
aucccggccggcg

SEQ ID NO: 41710 - RNA, 15 nt, Homo sapiens
aucccggccggcgcg

SEQ ID NO: 41711 - RNA, 16 nt, Homo sapiens
aucccggccggcgcgc

SEQ ID NO: 41712 - RNA, 18 nt, Homo sapiens
aucccggccggcgcgcuc

SEQ ID NO: 41713 - RNA, 22 nt, Homo sapiens
aucccggccggcgcgcucaucc

SEQ ID NO: 41714 - RNA, 23 nt, Homo sapiens
aucccggccggcgcgcucauccc

SEQ ID NO: 41715 - RNA, 13 nt, Homo sapiens
aucccuacuguaa

SEQ ID NO: 41716 - RNA, 18 nt, Homo sapiens
auccuaauaaaaagguga

SEQ ID NO: 41717 - RNA, 20 nt, Homo sapiens
auccuaauaaaaaggugacc

SEQ ID NO: 41718 - RNA, 17 nt, Homo sapiens
auccuagucucuaucau

SEQ ID NO: 41719 - RNA, 21 nt, Homo sapiens
auccuagucucuaucauuaaa

SEQ ID NO: 41720 - RNA, 22 nt, Homo sapiens
auccuagucucuaucauuaaag

SEQ ID NO: 41721 - RNA, 17 nt, Homo sapiens
auccuccuccugcuucc

SEQ ID NO: 41722 - RNA, 16 nt, Homo sapiens
auccucucaaccaccu

SEQ ID NO: 41723 - RNA, 15 nt, Homo sapiens
auccucuguguggcu

SEQ ID NO: 41724 - RNA, 14 nt, Homo sapiens
auccugcaauucca

SEQ ID NO: 41725 - RNA, 12 nt, Homo sapiens
auccuggaauau

SEQ ID NO: 41726 - RNA, 17 nt, Homo sapiens
auccugucccuccucca

SEQ ID NO: 41727 - RNA, 17 nt, Homo sapiens
auccugugacugucuca

SEQ ID NO: 41728 - RNA, 14 nt, Homo sapiens
auccugugggaccu

SEQ ID NO: 41729 - RNA, 16 nt, Homo sapiens
auccuucagccugaaa

SEQ ID NO: 41730 - RNA, 13 nt, Homo sapiens
aucgcuuuugaua

SEQ ID NO: 41731 - RNA, 18 nt, Homo sapiens
aucgcuuuugauaaucaa

SEQ ID NO: 41732 - RNA, 20 nt, Homo sapiens
aucgcuuuugauaaucaacu

SEQ ID NO: 41733 - RNA, 20 nt, Homo sapiens
aucgucacugcuuaacuuca

SEQ ID NO: 41734 - RNA, 16 nt, Homo sapiens
aucuaauauauaugaa

SEQ ID NO: 41735 - RNA, 14 nt, Homo sapiens
aucuacacuccagu

SEQ ID NO: 41736 - RNA, 14 nt, Homo sapiens
aucuacuugcacac

SEQ ID NO: 41737 - RNA, 15 nt, Homo sapiens
aucuagauacuguau

SEQ ID NO: 41738 - RNA, 18 nt, Homo sapiens
aucuagauacuguaucau

SEQ ID NO: 41739 - RNA, 13 nt, Homo sapiens
aucuauauuuuac

SEQ ID NO: 41740 - RNA, 19 nt, Homo sapiens
aucuauuuauuaauauuua

SEQ ID NO: 41741 - RNA, 14 nt, Homo sapiens
aucucaaaacugca

SEQ ID NO: 41742 - RNA, 11 nt, Homo sapiens
aucucaauauu

SEQ ID NO: 41743 - RNA, 14 nt, Homo sapiens
aucucaauauuuca

SEQ ID NO: 41744 - RNA, 15 nt, Homo sapiens
aucucacaagcacuu

SEQ ID NO: 41745 - RNA, 16 nt, Homo sapiens
aucucacaagcacuuu

SEQ ID NO: 41746 - RNA, 17 nt, Homo sapiens
aucucacaagcacuuuc

SEQ ID NO: 41747 - RNA, 24 nt, Homo sapiens
aucucaggagauuucaugccuggu

SEQ ID NO: 41748 - RNA, 13 nt, Homo sapiens
aucucauuuaauc

SEQ ID NO: 41749 - RNA, 16 nt, Homo sapiens
aucucauuuaauccuc

SEQ ID NO: 41750 - RNA, 16 nt, Homo sapiens
aucucauuuccaagca

SEQ ID NO: 41751 - RNA, 17 nt, Homo sapiens
aucucauuuccaagcaa

SEQ ID NO: 41752 - RNA, 20 nt, Homo sapiens
aucuccaaaauaaaacuuuu

SEQ ID NO: 41753 - RNA, 19 nt, Homo sapiens
aucuccgucucccaaagug

SEQ ID NO: 41754 - RNA, 22 nt, Homo sapiens
aucucuauuaggaaauauucug

SEQ ID NO: 41755 - RNA, 21 nt, Homo sapiens
aucuguaaaauggagacacca

SEQ ID NO: 41756 - RNA, 13 nt, Homo sapiens
aucuuguaaaggu

SEQ ID NO: 41757 - RNA, 18 nt, Homo sapiens
aucuuuaaaauacacacu

SEQ ID NO: 41758 - RNA, 21 nt, Homo sapiens
aucuuucaaagugucuugaau

SEQ ID NO: 41759 - RNA, 22 nt, Homo sapiens
aucuuuuauacagugucuuaca

SEQ ID NO: 41760 - RNA, 20 nt, Homo sapiens
augaaaacacauuuuucuua

SEQ ID NO: 41761 - RNA, 21 nt, Homo sapiens
augaaaacauagcaucucagg

SEQ ID NO: 41762 - RNA, 22 nt, Homo sapiens
augaaaacauagcaucucagga

SEQ ID NO: 41763 - RNA, 22 nt, Homo sapiens
augaaaagauuaugaucucaga

SEQ ID NO: 41764 - RNA, 14 nt, Homo sapiens
augaaaaugucauu

SEQ ID NO: 41765 - RNA, 14 nt, Homo sapiens
augaaauauuaugu

SEQ ID NO: 41766 - RNA, 21 nt, Homo sapiens
augaagaaguugauaugccuu

SEQ ID NO: 41767 - RNA, 12 nt, Homo sapiens
augaaggggcgg

SEQ ID NO: 41768 - RNA, 13 nt, Homo sapiens
augaaggggcggc

SEQ ID NO: 41769 - RNA, 16 nt, Homo sapiens
augaaggggcggcggc

SEQ ID NO: 41770 - RNA, 16 nt, Homo sapiens
augaaguacucauaca

SEQ ID NO: 41771 - RNA, 14 nt, Homo sapiens
augaaguccaagca

SEQ ID NO: 41772 - RNA, 14 nt, Homo sapiens
augaaugaauggcu

SEQ ID NO: 41773 - RNA, 14 nt, Homo sapiens
augaauguuaaauu

SEQ ID NO: 41774 - RNA, 17 nt, Homo sapiens
augaauuaaguuuuuuu

SEQ ID NO: 41775 - RNA, 19 nt, Homo sapiens
augaauuaaguuuuuuuuu

SEQ ID NO: 41776 - RNA, 20 nt, Homo sapiens
augaauuaaguuuuuuuuua

SEQ ID NO: 41777 - RNA, 21 nt, Homo sapiens
augaauuaaguuuuuuuuuaa

SEQ ID NO: 41778 - RNA, 12 nt, Homo sapiens
augaauuacauu

SEQ ID NO: 41779 - RNA, 15 nt, Homo sapiens
augaauuacauuugu

SEQ ID NO: 41780 - RNA, 15 nt, Homo sapiens
augacacaucucuga

SEQ ID NO: 41781 - RNA, 18 nt, Homo sapiens
augacauaucacauguca

SEQ ID NO: 41782 - RNA, 20 nt, Homo sapiens
augacccccaucccaugggg

SEQ ID NO: 41783 - RNA, 19 nt, Homo sapiens
augacgugacuggccugcu

SEQ ID NO: 41784 - RNA, 20 nt, Homo sapiens
augacgugacuggccugcug

SEQ ID NO: 41785 - RNA, 10 nt, Homo sapiens
augacuaugc

SEQ ID NO: 41786 - RNA, 14 nt, Homo sapiens
augagccggagccc

SEQ ID NO: 41787 - RNA, 17 nt, Homo sapiens
augaggaauauuugcaa

SEQ ID NO: 41788 - RNA, 13 nt, Homo sapiens
augaggcauuugu

SEQ ID NO: 41789 - RNA, 13 nt, Homo sapiens
augauacaaugaa

SEQ ID NO: 41790 - RNA, 14 nt, Homo sapiens
augaucaguaugaa

SEQ ID NO: 41791 - RNA, 17 nt, Homo sapiens
augaucaguaugaaaau

SEQ ID NO: 41792 - RNA, 19 nt, Homo sapiens
augaugaucuuuaaaauac

SEQ ID NO: 41793 - RNA, 14 nt, Homo sapiens
augaugaugaucuu

SEQ ID NO: 41794 - RNA, 20 nt, Homo sapiens
augauguuuagaaacacaac

SEQ ID NO: 41795 - RNA, 11 nt, Homo sapiens
augauuccacc

SEQ ID NO: 41796 - RNA, 19 nt, Homo sapiens
augauuccaccuacaugag

SEQ ID NO: 41797 - RNA, 12 nt, Homo sapiens
augauuucacag

SEQ ID NO: 41798 - RNA, 22 nt, Homo sapiens
augauuucacagugugugguca

SEQ ID NO: 41799 - RNA, 10 nt, Homo sapiens
augauuucau

SEQ ID NO: 41800 - RNA, 14 nt, Homo sapiens
augauuucauucaa

SEQ ID NO: 41801 - RNA, 18 nt, Homo sapiens
augcaaccuuuggaugca

SEQ ID NO: 41802 - RNA, 22 nt, Homo sapiens
augcaaccuuuggaugcacuuu

SEQ ID NO: 41803 - RNA, 15 nt, Homo sapiens
augcaaggucauuuu

SEQ ID NO: 41804 - RNA, 13 nt, Homo sapiens
augcacacagugc

SEQ ID NO: 41805 - RNA, 21 nt, Homo sapiens
augcacagaguuguuacauuu

SEQ ID NO: 41806 - RNA, 19 nt, Homo sapiens
augcacuaaucaauacuuu

SEQ ID NO: 41807 - RNA, 22 nt, Homo sapiens
augcagcccccauuguggucac

SEQ ID NO: 41808 - RNA, 22 nt, Homo sapiens
augcaguguuucccucuguguu

SEQ ID NO: 41809 - RNA, 13 nt, Homo sapiens
augcauacaguaa

SEQ ID NO: 41810 - RNA, 21 nt, Homo sapiens
augcaucuuacugaagguaaa

SEQ ID NO: 41811 - RNA, 23 nt, Homo sapiens
augcaugaaguaauaugcacaca

SEQ ID NO: 41812 - RNA, 12 nt, Homo sapiens
augcauucugag

SEQ ID NO: 41813 - RNA, 18 nt, Homo sapiens
augccccauucaacaucu

SEQ ID NO: 41814 - RNA, 14 nt, Homo sapiens
augccugcaaucug

SEQ ID NO: 41815 - RNA, 11 nt, Homo sapiens
augcucuccaa

SEQ ID NO: 41816 - RNA, 15 nt, Homo sapiens
augcucuccaaacca

SEQ ID NO: 41817 - RNA, 11 nt, Homo sapiens
augcuggccag

SEQ ID NO: 41818 - RNA, 14 nt, Homo sapiens
augcuguauuuuaa

SEQ ID NO: 41819 - RNA, 17 nt, Homo sapiens
augcuguucaugaaaga

SEQ ID NO: 41820 - RNA, 18 nt, Homo sapiens
augcuguucaugaaagau

SEQ ID NO: 41821 - RNA, 16 nt, Homo sapiens
augcuucuguuuuaua

SEQ ID NO: 41822 - RNA, 12 nt, Homo sapiens
augcuuguacau

SEQ ID NO: 41823 - RNA, 13 nt, Homo sapiens
augcuuguacaua

SEQ ID NO: 41824 - RNA, 23 nt, Homo sapiens
augcuuguauuuuacuuuuccau

SEQ ID NO: 41825 - RNA, 13 nt, Homo sapiens
auggaacauaaaa

SEQ ID NO: 41826 - RNA, 23 nt, Homo sapiens
auggaaguugcagugagcugaua

SEQ ID NO: 41827 - RNA, 13 nt, Homo sapiens
auggaauuggagc

SEQ ID NO: 41828 - RNA, 15 nt, Homo sapiens
auggaauuggagcuc

SEQ ID NO: 41829 - RNA, 16 nt, Homo sapiens
auggaauuggagcucg

SEQ ID NO: 41830 - RNA, 13 nt, Homo sapiens
auggagacaccac

SEQ ID NO: 41831 - RNA, 14 nt, Homo sapiens
auggagacaccacc

SEQ ID NO: 41832 - RNA, 17 nt, Homo sapiens
auggagacaccaccacc

SEQ ID NO: 41833 - RNA, 20 nt, Homo sapiens
auggagguuaagcacuuuaa

SEQ ID NO: 41834 - RNA, 14 nt, Homo sapiens
auggcaaacugcca

SEQ ID NO: 41835 - RNA, 17 nt, Homo sapiens
auggcagcuuuccucaa

SEQ ID NO: 41836 - RNA, 18 nt, Homo sapiens
auggcaggaggcauccaa

SEQ ID NO: 41837 - RNA, 13 nt, Homo sapiens
auggcaggcaucg

SEQ ID NO: 41838 - RNA, 13 nt, Homo sapiens
auggcccugccau

SEQ ID NO: 41839 - RNA, 22 nt, Homo sapiens
auggcccugccaugcucuccaa

SEQ ID NO: 41840 - RNA, 18 nt, Homo sapiens
auggcuaguaucaaaaga

SEQ ID NO: 41841 - RNA, 16 nt, Homo sapiens
auggcuauaggugcua

SEQ ID NO: 41842 - RNA, 18 nt, Homo sapiens
auggcuggagcuagaauu

SEQ ID NO: 41843 - RNA, 17 nt, Homo sapiens
auggcuuccuggcaaua

SEQ ID NO: 41844 - RNA, 16 nt, Homo sapiens
auggcuuuugugcauu

SEQ ID NO: 41845 - RNA, 12 nt, Homo sapiens
augggccccaga

SEQ ID NO: 41846 - RNA, 23 nt, Homo sapiens
auggggguaauaagagcaguagc

SEQ ID NO: 41847 - RNA, 20 nt, Homo sapiens
augguggcgcgcaccuguaa

SEQ ID NO: 41848 - RNA, 15 nt, Homo sapiens
augguuccauucucu

SEQ ID NO: 41849 - RNA, 11 nt, Homo sapiens
auguaacaaca

SEQ ID NO: 41850 - RNA, 12 nt, Homo sapiens
auguaacaacaa

SEQ ID NO: 41851 - RNA, 20 nt, Homo sapiens
auguaacaacaauuauuuga

SEQ ID NO: 41852 - RNA, 18 nt, Homo sapiens
auguagaauauauuuccu

SEQ ID NO: 41853 - RNA, 17 nt, Homo sapiens
auguagauaaacucaga

SEQ ID NO: 41854 - RNA, 19 nt, Homo sapiens
auguagauaaacucagaaa

SEQ ID NO: 41855 - RNA, 16 nt, Homo sapiens
auguagauaaagcacu

SEQ ID NO: 41856 - RNA, 23 nt, Homo sapiens
auguagcaaauuccaauacauua

SEQ ID NO: 41857 - RNA, 17 nt, Homo sapiens
auguagcagcucauaaa

SEQ ID NO: 41858 - RNA, 16 nt, Homo sapiens
auguauguaaauagcu

SEQ ID NO: 41859 - RNA, 14 nt, Homo sapiens
auguauguacuuca

SEQ ID NO: 41860 - RNA, 22 nt, Homo sapiens
auguauuacaguggggaaugaa

SEQ ID NO: 41861 - RNA, 19 nt, Homo sapiens
augucagacagaacuugaa

SEQ ID NO: 41862 - RNA, 16 nt, Homo sapiens
augucagccacuguga

SEQ ID NO: 41863 - RNA, 19 nt, Homo sapiens
augucagccacugugauag

SEQ ID NO: 41864 - RNA, 19 nt, Homo sapiens
augucauuugcuggagcuc

SEQ ID NO: 41865 - RNA, 21 nt, Homo sapiens
augugaaacuggauuaaacuu

SEQ ID NO: 41866 - RNA, 17 nt, Homo sapiens
augugaacacaucagcu

SEQ ID NO: 41867 - RNA, 18 nt, Homo sapiens
augugacuuaaugccacu

SEQ ID NO: 41868 - RNA, 20 nt, Homo sapiens
augugacuuggauucaauuu

SEQ ID NO: 41869 - RNA, 14 nt, Homo sapiens
augugaugaucuac

SEQ ID NO: 41870 - RNA, 23 nt, Homo sapiens
auguggagggggcgcgugcaggc

SEQ ID NO: 41871 - RNA, 23 nt, Homo sapiens
auguguaaaauaagguuaugauu

SEQ ID NO: 41872 - RNA, 13 nt, Homo sapiens
auguguaagacaa

SEQ ID NO: 41873 - RNA, 23 nt, Homo sapiens
augugucaggugacccugaugaa

SEQ ID NO: 41874 - RNA, 16 nt, Homo sapiens
auguguggcauuuuca

SEQ ID NO: 41875 - RNA, 15 nt, Homo sapiens
auguguuuuucacau

SEQ ID NO: 41876 - RNA, 14 nt, Homo sapiens
auguuaauauuucu

SEQ ID NO: 41877 - RNA, 19 nt, Homo sapiens
auguuagugcaaauuguca

SEQ ID NO: 41878 - RNA, 13 nt, Homo sapiens
auguuaugcauaa

SEQ ID NO: 41879 - RNA, 21 nt, Homo sapiens
auguuaugcauaaagucagug

SEQ ID NO: 41880 - RNA, 22 nt, Homo sapiens
auguucacuuauugacuauuau

SEQ ID NO: 41881 - RNA, 17 nt, Homo sapiens
auguucuuuggggagcc

SEQ ID NO: 41882 - RNA, 22 nt, Homo sapiens
auguugaaaaaguucugcagau

SEQ ID NO: 41883 - RNA, 19 nt, Homo sapiens
auguuucgcugauauaugu

SEQ ID NO: 41884 - RNA, 12 nt, Homo sapiens
auguuuucacaa

SEQ ID NO: 41885 - RNA, 10 nt, Homo sapiens
auguuuucau

SEQ ID NO: 41886 - RNA, 23 nt, Homo sapiens
auuaaaacucauuuuuguuuuca

SEQ ID NO: 41887 - RNA, 17 nt, Homo sapiens
auuaaaaucacaaacuc

SEQ ID NO: 41888 - RNA, 17 nt, Homo sapiens
auuaaaguucuagugac

SEQ ID NO: 41889 - RNA, 13 nt, Homo sapiens
auuaaauaaaauu

SEQ ID NO: 41890 - RNA, 14 nt, Homo sapiens
auuaaauaaaauuu

SEQ ID NO: 41891 - RNA, 21 nt, Homo sapiens
auuaacuuuuauaaacuuuac

SEQ ID NO: 41892 - RNA, 22 nt, Homo sapiens
auuaaggauuuuaugcuuuaaa

SEQ ID NO: 41893 - RNA, 22 nt, Homo sapiens
auuaaguuuuuuuuuaaaaaag

SEQ ID NO: 41894 - RNA, 11 nt, Homo sapiens
auuaauuugua

SEQ ID NO: 41895 - RNA, 21 nt, Homo sapiens
auuacaaggcuuuaucucagg

SEQ ID NO: 41896 - RNA, 22 nt, Homo sapiens
auuacaaggcuuuaucucaggg

SEQ ID NO: 41897 - RNA, 15 nt, Homo sapiens
auuacaggcgugagc

SEQ ID NO: 41898 - RNA, 13 nt, Homo sapiens
auuacauuuguau

SEQ ID NO: 41899 - RNA, 17 nt, Homo sapiens
auuaccucugauaccuc

SEQ ID NO: 41900 - RNA, 16 nt, Homo sapiens
auuacuguaagaaaau

SEQ ID NO: 41901 - RNA, 18 nt, Homo sapiens
auuagaggucuccaaaau

SEQ ID NO: 41902 - RNA, 12 nt, Homo sapiens
auuagaugacug

SEQ ID NO: 41903 - RNA, 18 nt, Homo sapiens
auuagccgggcauggugg

SEQ ID NO: 41904 - RNA, 13 nt, Homo sapiens
auuagccgggcgu

SEQ ID NO: 41905 - RNA, 14 nt, Homo sapiens
auuagccgggcgug

SEQ ID NO: 41906 - RNA, 12 nt, Homo sapiens
auuaguuuuaua

SEQ ID NO: 41907 - RNA, 16 nt, Homo sapiens
auuauagucacuaguu

SEQ ID NO: 41908 - RNA, 16 nt, Homo sapiens
auuauauauacuauau

SEQ ID NO: 41909 - RNA, 14 nt, Homo sapiens
auuauauucauucu

SEQ ID NO: 41910 - RNA, 10 nt, Homo sapiens
auuauauuua

SEQ ID NO: 41911 - RNA, 23 nt, Homo sapiens
auuaucucaaaacugcacuguca

SEQ ID NO: 41912 - RNA, 15 nt, Homo sapiens
auuaugaauuacauu

SEQ ID NO: 41913 - RNA, 17 nt, Homo sapiens
auuaugaauuacauuug

SEQ ID NO: 41914 - RNA, 19 nt, Homo sapiens
auuaugaauuacauuugua

SEQ ID NO: 41915 - RNA, 18 nt, Homo sapiens
auuauggcugguaacaua

SEQ ID NO: 41916 - RNA, 15 nt, Homo sapiens
auuauucccauucua

SEQ ID NO: 41917 - RNA, 18 nt, Homo sapiens
auuauuggacuuccauuu

SEQ ID NO: 41918 - RNA, 13 nt, Homo sapiens
auuauuuuuacag

SEQ ID NO: 41919 - RNA, 18 nt, Homo sapiens
auucaaacuaauagaauu

SEQ ID NO: 41920 - RNA, 14 nt, Homo sapiens
auucaaaugucuau

SEQ ID NO: 41921 - RNA, 16 nt, Homo sapiens
auucaacaucuaguga

SEQ ID NO: 41922 - RNA, 20 nt, Homo sapiens
auucaaugccccugaauuua

SEQ ID NO: 41923 - RNA, 16 nt, Homo sapiens
auucacaagacccaaa

SEQ ID NO: 41924 - RNA, 17 nt, Homo sapiens
auucacaagacccaaaa

SEQ ID NO: 41925 - RNA, 19 nt, Homo sapiens
auucacaagacccaaaagg

SEQ ID NO: 41926 - RNA, 16 nt, Homo sapiens
auucacagauaccucu

SEQ ID NO: 41927 - RNA, 22 nt, Homo sapiens
auucaccuuccagugucucgga

SEQ ID NO: 41928 - RNA, 22 nt, Homo sapiens
auucagauaugauucaaauguc

SEQ ID NO: 41929 - RNA, 21 nt, Homo sapiens
auucagccccgggaguggcgc

SEQ ID NO: 41930 - RNA, 22 nt, Homo sapiens
auucagccccgggaguggcgcg

SEQ ID NO: 41931 - RNA, 16 nt, Homo sapiens
auucaggaugcccacg

SEQ ID NO: 41932 - RNA, 17 nt, Homo sapiens
auucaggaugcccacgg

SEQ ID NO: 41933 - RNA, 16 nt, Homo sapiens
auucauuaguuuugaa

SEQ ID NO: 41934 - RNA, 21 nt, Homo sapiens
auuccaagccucauguccacu

SEQ ID NO: 41935 - RNA, 17 nt, Homo sapiens
auucccuccugcuacuc

SEQ ID NO: 41936 - RNA, 18 nt, Homo sapiens
auucccuuuugcugccuc

SEQ ID NO: 41937 - RNA, 23 nt, Homo sapiens
auucccuuuugcugccucuaaaa

SEQ ID NO: 41938 - RNA, 19 nt, Homo sapiens
auuccuauauccugugacu

SEQ ID NO: 41939 - RNA, 21 nt, Homo sapiens
auucgcugcaaccuguugaua

SEQ ID NO: 41940 - RNA, 14 nt, Homo sapiens
auucucuccuguac

SEQ ID NO: 41941 - RNA, 19 nt, Homo sapiens
auucucuccuguaccucuu

SEQ ID NO: 41942 - RNA, 16 nt, Homo sapiens
auucucucuccuguac

SEQ ID NO: 41943 - RNA, 17 nt, Homo sapiens
auucugagguaaccuca

SEQ ID NO: 41944 - RNA, 18 nt, Homo sapiens
auucugagguaaccucau

SEQ ID NO: 41945 - RNA, 14 nt, Homo sapiens
auucugcaagcuuu

SEQ ID NO: 41946 - RNA, 15 nt, Homo sapiens
auucugcaagcuuuu

SEQ ID NO: 41947 - RNA, 18 nt, Homo sapiens
auucugccugcccugaaa

SEQ ID NO: 41948 - RNA, 14 nt, Homo sapiens
auucuguuaaucau

SEQ ID NO: 41949 - RNA, 21 nt, Homo sapiens
auucuucuuugguggagauaa

SEQ ID NO: 41950 - RNA, 18 nt, Homo sapiens
auucuuuacccccuggga

SEQ ID NO: 41951 - RNA, 17 nt, Homo sapiens
auugaaaggcauucucu

SEQ ID NO: 41952 - RNA, 21 nt, Homo sapiens
auugaaaggcauucucugaag

SEQ ID NO: 41953 - RNA, 18 nt, Homo sapiens
auugaaguuuuggcaauu

SEQ ID NO: 41954 - RNA, 12 nt, Homo sapiens
auugagcaccug

SEQ ID NO: 41955 - RNA, 14 nt, Homo sapiens
auugagcaccugca

SEQ ID NO: 41956 - RNA, 17 nt, Homo sapiens
auugagcaccugcaggc

SEQ ID NO: 41957 - RNA, 20 nt, Homo sapiens
auugagcaccugcaggcgug

SEQ ID NO: 41958 - RNA, 17 nt, Homo sapiens
auugaggcuuuaaaacu

SEQ ID NO: 41959 - RNA, 19 nt, Homo sapiens
auugaggcuuuaaaacuua

SEQ ID NO: 41960 - RNA, 22 nt, Homo sapiens
auugauguuuucacaaagaaca

SEQ ID NO: 41961 - RNA, 14 nt, Homo sapiens
auugauguuuucau

SEQ ID NO: 41962 - RNA, 21 nt, Homo sapiens
auugccaugagaguucuguca

SEQ ID NO: 41963 - RNA, 17 nt, Homo sapiens
auugcuaucgccaucac

SEQ ID NO: 41964 - RNA, 13 nt, Homo sapiens
auugcugaaugac

SEQ ID NO: 41965 - RNA, 21 nt, Homo sapiens
auugcuuguuagcaaaaugga

SEQ ID NO: 41966 - RNA, 16 nt, Homo sapiens
auuggacuuccauuug

SEQ ID NO: 41967 - RNA, 22 nt, Homo sapiens
auuguaaaauggugugaccacu

SEQ ID NO: 41968 - RNA, 15 nt, Homo sapiens
auuguaacuuaugaa

SEQ ID NO: 41969 - RNA, 16 nt, Homo sapiens
auugucugaaauuuuc

SEQ ID NO: 41970 - RNA, 20 nt, Homo sapiens
auugugccccugcacuccag

SEQ ID NO: 41971 - RNA, 19 nt, Homo sapiens
auuguugacaacugugacu

SEQ ID NO: 41972 - RNA, 23 nt, Homo sapiens
auuguuugcuaagcauuccaacu

SEQ ID NO: 41973 - RNA, 18 nt, Homo sapiens
auuuaaaaaaaaaccuga

SEQ ID NO: 41974 - RNA, 19 nt, Homo sapiens
auuuaacagaaauguacag

SEQ ID NO: 41975 - RNA, 14 nt, Homo sapiens
auuuaagauaugua

SEQ ID NO: 41976 - RNA, 15 nt, Homo sapiens
auuuaagauauguaa

SEQ ID NO: 41977 - RNA, 14 nt, Homo sapiens
auuuaaguuucaca

SEQ ID NO: 41978 - RNA, 21 nt, Homo sapiens
auuuaauaaaugugccuucau

SEQ ID NO: 41979 - RNA, 17 nt, Homo sapiens
auuuaauuugaagauag

SEQ ID NO: 41980 - RNA, 17 nt, Homo sapiens
auuuaccacuuguguuu

SEQ ID NO: 41981 - RNA, 20 nt, Homo sapiens
auuuaguauuuuguuucagu

SEQ ID NO: 41982 - RNA, 14 nt, Homo sapiens
auuuaguuauaaaa

SEQ ID NO: 41983 - RNA, 12 nt, Homo sapiens
auuuauaaucac

SEQ ID NO: 41984 - RNA, 17 nt, Homo sapiens
auuuauaaucacuuuuu

SEQ ID NO: 41985 - RNA, 17 nt, Homo sapiens
auuuauccuuguuaagu

SEQ ID NO: 41986 - RNA, 14 nt, Homo sapiens
auuuauuaccucug

SEQ ID NO: 41987 - RNA, 17 nt, Homo sapiens
auuuauugaaaugauuu

SEQ ID NO: 41988 - RNA, 15 nt, Homo sapiens
auuuauugaggcuuu

SEQ ID NO: 41989 - RNA, 23 nt, Homo sapiens
auuucaaaacucauuuccuaugu

SEQ ID NO: 41990 - RNA, 13 nt, Homo sapiens
auuucacagugug

SEQ ID NO: 41991 - RNA, 23 nt, Homo sapiens
auuucacuugaugauacaaugaa

SEQ ID NO: 41992 - RNA, 13 nt, Homo sapiens
auuucacuuuaga

SEQ ID NO: 41993 - RNA, 18 nt, Homo sapiens
auuucauaccuaucaucu

SEQ ID NO: 41994 - RNA, 20 nt, Homo sapiens
auuucauaccuaucaucuua

SEQ ID NO: 41995 - RNA, 17 nt, Homo sapiens
auuuccaaauucacaag

SEQ ID NO: 41996 - RNA, 21 nt, Homo sapiens
auuuccaagaaauauuccuua

SEQ ID NO: 41997 - RNA, 15 nt, Homo sapiens
auuucuaggacugaa

SEQ ID NO: 41998 - RNA, 16 nt, Homo sapiens
auuucuaggacugaau

SEQ ID NO: 41999 - RNA, 13 nt, Homo sapiens
auuugaagauuua

SEQ ID NO: 42000 - RNA, 14 nt, Homo sapiens
auuugaagauuuaa

SEQ ID NO: 42001 - RNA, 15 nt, Homo sapiens
auuugauaugugaac

SEQ ID NO: 42002 - RNA, 14 nt, Homo sapiens
auuugcaagacaua

SEQ ID NO: 42003 - RNA, 15 nt, Homo sapiens
auuugcaagacauag

SEQ ID NO: 42004 - RNA, 11 nt, Homo sapiens
auuugcacuau

SEQ ID NO: 42005 - RNA, 15 nt, Homo sapiens
auuugcucauggaau

SEQ ID NO: 42006 - RNA, 15 nt, Homo sapiens
auuuggcagugauau

SEQ ID NO: 42007 - RNA, 19 nt, Homo sapiens
auuugguucuaggccgggc

SEQ ID NO: 42008 - RNA, 20 nt, Homo sapiens
auuugguucuaggccgggcg

SEQ ID NO: 42009 - RNA, 18 nt, Homo sapiens
auuuguuaaaauuaucaa

SEQ ID NO: 42010 - RNA, 19 nt, Homo sapiens
auuuguuaaaauuaucaau

SEQ ID NO: 42011 - RNA, 13 nt, Homo sapiens
auuuguuugcaua

SEQ ID NO: 42012 - RNA, 16 nt, Homo sapiens
auuuuaaaagaaugau

SEQ ID NO: 42013 - RNA, 22 nt, Homo sapiens
auuuuaacuuccuuggacucau

SEQ ID NO: 42014 - RNA, 17 nt, Homo sapiens
auuuuaaggcauauuua

SEQ ID NO: 42015 - RNA, 20 nt, Homo sapiens
auuuuaaggcauauuuaaca

SEQ ID NO: 42016 - RNA, 16 nt, Homo sapiens
auuuuaaguaauuuca

SEQ ID NO: 42017 - RNA, 18 nt, Homo sapiens
auuuuaaguaauuucaga

SEQ ID NO: 42018 - RNA, 15 nt, Homo sapiens
auuuuaauaauguuu

SEQ ID NO: 42019 - RNA, 16 nt, Homo sapiens
auuuuaaucaccaagg

SEQ ID NO: 42020 - RNA, 23 nt, Homo sapiens
auuuuaauguuucuuggggaaua

SEQ ID NO: 42021 - RNA, 20 nt, Homo sapiens
auuuuagacauucuuuaucu

SEQ ID NO: 42022 - RNA, 21 nt, Homo sapiens
auuuuagacauucuuuaucuu

SEQ ID NO: 42023 - RNA, 17 nt, Homo sapiens
auuuuagagcaucucau

SEQ ID NO: 42024 - RNA, 22 nt, Homo sapiens
auuuuagggguagcauuugugu

SEQ ID NO: 42025 - RNA, 14 nt, Homo sapiens
auuuuaucugcuau

SEQ ID NO: 42026 - RNA, 13 nt, Homo sapiens
auuuuaugcuuua

SEQ ID NO: 42027 - RNA, 15 nt, Homo sapiens
auuuuauuaugcaug

SEQ ID NO: 42028 - RNA, 15 nt, Homo sapiens
auuuuauuuuauuau

SEQ ID NO: 42029 - RNA, 19 nt, Homo sapiens
auuuucaaaaucaaauucc

SEQ ID NO: 42030 - RNA, 13 nt, Homo sapiens
auuuucacuuuug

SEQ ID NO: 42031 - RNA, 20 nt, Homo sapiens
auuuucacuuuuggcuugua

SEQ ID NO: 42032 - RNA, 16 nt, Homo sapiens
auuuucaugcuguuca

SEQ ID NO: 42033 - RNA, 14 nt, Homo sapiens
auuuuccugaaaac

SEQ ID NO: 42034 - RNA, 19 nt, Homo sapiens
auuuuccuggacaguuuuc

SEQ ID NO: 42035 - RNA, 17 nt, Homo sapiens
auuuugauguuuuaagg

SEQ ID NO: 42036 - RNA, 19 nt, Homo sapiens
auuuuuacaguucucccaa

SEQ ID NO: 42037 - RNA, 17 nt, Homo sapiens
auuuuuagacucaucaa

SEQ ID NO: 42038 - RNA, 15 nt, Homo sapiens
auuuuuaugugcaau

SEQ ID NO: 42039 - RNA, 16 nt, Homo sapiens
auuuuuaugugcaaua

SEQ ID NO: 42040 - RNA, 12 nt, Homo sapiens
auuuuucucaau

SEQ ID NO: 42041 - RNA, 14 nt, Homo sapiens
auuuuugaaaccaa

SEQ ID NO: 42042 - RNA, 21 nt, Homo sapiens
auuuuuuaugaaacauuacag

SEQ ID NO: 42043 - RNA, 16 nt, Homo sapiens
auuuuuuucugaaauu

SEQ ID NO: 42044 - RNA, 21 nt, Homo sapiens
auuuuuuuucuguuauauaaa

SEQ ID NO: 42045 - RNA, 21 nt, Homo sapiens
auuuuuuuuuucaauaaaacu

SEQ ID NO: 42046 - RNA, 24 nt, Homo sapiens
caaaaacacagcaagggugauggg

SEQ ID NO: 42047 - RNA, 19 nt, Homo sapiens
caaaauaccaugccauuua

SEQ ID NO: 42048 - RNA, 17 nt, Homo sapiens
caaaauauagcuuucau

SEQ ID NO: 42049 - RNA, 16 nt, Homo sapiens
caaaauggauaugaca

SEQ ID NO: 42050 - RNA, 16 nt, Homo sapiens
caaaauugggaaagga

SEQ ID NO: 42051 - RNA, 12 nt, Homo sapiens
caaacagaacua

SEQ ID NO: 42052 - RNA, 17 nt, Homo sapiens
caaacagaacuauggaa

SEQ ID NO: 42053 - RNA, 14 nt, Homo sapiens
caaacccggccuga

SEQ ID NO: 42054 - RNA, 13 nt, Homo sapiens
caaacgaaaaaca

SEQ ID NO: 42055 - RNA, 14 nt, Homo sapiens
caaacgaaaaacau

SEQ ID NO: 42056 - RNA, 19 nt, Homo sapiens
caaacugccaucauuuacu

SEQ ID NO: 42057 - RNA, 21 nt, Homo sapiens
caaacugccaucauuuacuuu

SEQ ID NO: 42058 - RNA, 23 nt, Homo sapiens
caaacuuaacaaugacuuguacu

SEQ ID NO: 42059 - RNA, 13 nt, Homo sapiens
caaagaagacaac

SEQ ID NO: 42060 - RNA, 14 nt, Homo sapiens
caaagacaaauucu

SEQ ID NO: 42061 - RNA, 23 nt, Homo sapiens
caaagacugaguacguugugcau

SEQ ID NO: 42062 - RNA, 10 nt, Homo sapiens
caaagauagg

SEQ ID NO: 42063 - RNA, 17 nt, Homo sapiens
caaagcugaauacauuc

SEQ ID NO: 42064 - RNA, 14 nt, Homo sapiens
caaaggcuccugag

SEQ ID NO: 42065 - RNA, 13 nt, Homo sapiens
caaagugcuggga

SEQ ID NO: 42066 - RNA, 23 nt, Homo sapiens
caaauaaguauuuauaauagcaa

SEQ ID NO: 42067 - RNA, 18 nt, Homo sapiens
caaaucuacugucaauuu

SEQ ID NO: 42068 - RNA, 16 nt, Homo sapiens
caaaucuuaacuugaa

SEQ ID NO: 42069 - RNA, 20 nt, Homo sapiens
caaaugagccggagccccuu

SEQ ID NO: 42070 - RNA, 14 nt, Homo sapiens
caaaugcuguauuc

SEQ ID NO: 42071 - RNA, 16 nt, Homo sapiens
caaauguuaugcauaa

SEQ ID NO: 42072 - RNA, 11 nt, Homo sapiens
caaauguucuc

SEQ ID NO: 42073 - RNA, 15 nt, Homo sapiens
caaauuccaauacau

SEQ ID NO: 42074 - RNA, 19 nt, Homo sapiens
caaauucuguuucuugaga

SEQ ID NO: 42075 - RNA, 22 nt, Homo sapiens
caaauugucacaggacagcccu

SEQ ID NO: 42076 - RNA, 14 nt, Homo sapiens
caacaaauaggaau

SEQ ID NO: 42077 - RNA, 22 nt, Homo sapiens
caacacgagcaggcuacuguca

SEQ ID NO: 42078 - RNA, 18 nt, Homo sapiens
caacagaagcuuccauuc

SEQ ID NO: 42079 - RNA, 16 nt, Homo sapiens
caacagauuauuaccu

SEQ ID NO: 42080 - RNA, 17 nt, Homo sapiens
caacaugccagccacug

SEQ ID NO: 42081 - RNA, 18 nt, Homo sapiens
caacaugccagccacugu

SEQ ID NO: 42082 - RNA, 16 nt, Homo sapiens
caacauuaaaacaaua

SEQ ID NO: 42083 - RNA, 13 nt, Homo sapiens
caaccaaauggag

SEQ ID NO: 42084 - RNA, 20 nt, Homo sapiens
caaccaaauggagugacuua

SEQ ID NO: 42085 - RNA, 13 nt, Homo sapiens
caaccuaaauuug

SEQ ID NO: 42086 - RNA, 18 nt, Homo sapiens
caaccucucccaacuaua

SEQ ID NO: 42087 - RNA, 15 nt, Homo sapiens
caaccugggggcuuu

SEQ ID NO: 42088 - RNA, 19 nt, Homo sapiens
caaccugggggcuuuaggg

SEQ ID NO: 42089 - RNA, 17 nt, Homo sapiens
caacuauauuaucaugc

SEQ ID NO: 42090 - RNA, 13 nt, Homo sapiens
caacuauauuguu

SEQ ID NO: 42091 - RNA, 23 nt, Homo sapiens
caacuaucucauuuccaagcaag

SEQ ID NO: 42092 - RNA, 17 nt, Homo sapiens
caacugggguggguggg

SEQ ID NO: 42093 - RNA, 22 nt, Homo sapiens
caacugggguggguggggcagu

SEQ ID NO: 42094 - RNA, 20 nt, Homo sapiens
caacuugaauaauacaccag

SEQ ID NO: 42095 - RNA, 14 nt, Homo sapiens
caagaaauauuccu

SEQ ID NO: 42096 - RNA, 16 nt, Homo sapiens
caagaaaugaaagcag

SEQ ID NO: 42097 - RNA, 22 nt, Homo sapiens
caagaacuuauuuguacauuuu

SEQ ID NO: 42098 - RNA, 11 nt, Homo sapiens
caagaaugaga

SEQ ID NO: 42099 - RNA, 19 nt, Homo sapiens
caagacucugucucaaaaa

SEQ ID NO: 42100 - RNA, 20 nt, Homo sapiens
caagaucuuuuuccagguuc

SEQ ID NO: 42101 - RNA, 18 nt, Homo sapiens
caagaugugggcagugau

SEQ ID NO: 42102 - RNA, 14 nt, Homo sapiens
caagcaaauggcca

SEQ ID NO: 42103 - RNA, 12 nt, Homo sapiens
caagcacuuucc

SEQ ID NO: 42104 - RNA, 22 nt, Homo sapiens
caagcacuuucccucuuggugc

SEQ ID NO: 42105 - RNA, 20 nt, Homo sapiens
caagcauaccaacacgagca

SEQ ID NO: 42106 - RNA, 11 nt, Homo sapiens
caagccagauu

SEQ ID NO: 42107 - RNA, 23 nt, Homo sapiens
caagccagccuugcuccuggcug

SEQ ID NO: 42108 - RNA, 19 nt, Homo sapiens
caagccaucggagcugcua

SEQ ID NO: 42109 - RNA, 12 nt, Homo sapiens
caagccugacca

SEQ ID NO: 42110 - RNA, 16 nt, Homo sapiens
caagccugccucaauc

SEQ ID NO: 42111 - RNA, 19 nt, Homo sapiens
caagcuuuucaaaauugga

SEQ ID NO: 42112 - RNA, 14 nt, Homo sapiens
caaggcccccgggc

SEQ ID NO: 42113 - RNA, 15 nt, Homo sapiens
caaggcccccgggcc

SEQ ID NO: 42114 - RNA, 17 nt, Homo sapiens
caaggcccccgggccga

SEQ ID NO: 42115 - RNA, 13 nt, Homo sapiens
caaggcuggagug

SEQ ID NO: 42116 - RNA, 15 nt, Homo sapiens
caaggcuggagugca

SEQ ID NO: 42117 - RNA, 16 nt, Homo sapiens
caaggcuuagacccuc

SEQ ID NO: 42118 - RNA, 17 nt, Homo sapiens
caaggcuuagacccuca

SEQ ID NO: 42119 - RNA, 15 nt, Homo sapiens
caaggcuuuaucuca

SEQ ID NO: 42120 - RNA, 13 nt, Homo sapiens
caagggaccucuc

SEQ ID NO: 42121 - RNA, 13 nt, Homo sapiens
caagggaccugcu

SEQ ID NO: 42122 - RNA, 14 nt, Homo sapiens
caaggucauuuuuu

SEQ ID NO: 42123 - RNA, 15 nt, Homo sapiens
caaggucauuuuuuu

SEQ ID NO: 42124 - RNA, 21 nt, Homo sapiens
caagguucuucccuuuuacau

SEQ ID NO: 42125 - RNA, 15 nt, Homo sapiens
caagucagucauuca

SEQ ID NO: 42126 - RNA, 17 nt, Homo sapiens
caagugaaaaacaucca

SEQ ID NO: 42127 - RNA, 18 nt, Homo sapiens
caagugaaaaacauccag

SEQ ID NO: 42128 - RNA, 15 nt, Homo sapiens
caagugauccgccca

SEQ ID NO: 42129 - RNA, 17 nt, Homo sapiens
caagugauccgcccauc

SEQ ID NO: 42130 - RNA, 15 nt, Homo sapiens
caaguuaguucaauc

SEQ ID NO: 42131 - RNA, 17 nt, Homo sapiens
caauaaaacuuuuccaa

SEQ ID NO: 42132 - RNA, 19 nt, Homo sapiens
caauaaagcagcguuucua

SEQ ID NO: 42133 - RNA, 22 nt, Homo sapiens
caauaaagcagcguuucuauga

SEQ ID NO: 42134 - RNA, 23 nt, Homo sapiens
caauaucuaauauauaugaauaa

SEQ ID NO: 42135 - RNA, 20 nt, Homo sapiens
caaucacaaaaguauauuca

SEQ ID NO: 42136 - RNA, 21 nt, Homo sapiens
caaucagccuaguugaucagc

SEQ ID NO: 42137 - RNA, 16 nt, Homo sapiens
caaucaguauucauau

SEQ ID NO: 42138 - RNA, 15 nt, Homo sapiens
caaucaucaaccccc

SEQ ID NO: 42139 - RNA, 14 nt, Homo sapiens
caaucaugaauuag

SEQ ID NO: 42140 - RNA, 19 nt, Homo sapiens
caauccugauucauauuua

SEQ ID NO: 42141 - RNA, 15 nt, Homo sapiens
caaucuuaacucauu

SEQ ID NO: 42142 - RNA, 13 nt, Homo sapiens
caaucuucucaga

SEQ ID NO: 42143 - RNA, 16 nt, Homo sapiens
caaugagaucauugug

SEQ ID NO: 42144 - RNA, 17 nt, Homo sapiens
caaugagaucauuguga

SEQ ID NO: 42145 - RNA, 14 nt, Homo sapiens
caaugauaaugcua

SEQ ID NO: 42146 - RNA, 15 nt, Homo sapiens
caaugauaaugcuaa

SEQ ID NO: 42147 - RNA, 16 nt, Homo sapiens
caaugcauucugaggu

SEQ ID NO: 42148 - RNA, 20 nt, Homo sapiens
caaugccccugaauuuaaau

SEQ ID NO: 42149 - RNA, 21 nt, Homo sapiens
caaugccccugaauuuaaaua

SEQ ID NO: 42150 - RNA, 22 nt, Homo sapiens
caauuaaggauuuuaugcuuua

SEQ ID NO: 42151 - RNA, 23 nt, Homo sapiens
caauuauaucaguccucuuucaa

SEQ ID NO: 42152 - RNA, 16 nt, Homo sapiens
caauuauuugaagauu

SEQ ID NO: 42153 - RNA, 18 nt, Homo sapiens
caauuauuugaagauuua

SEQ ID NO: 42154 - RNA, 17 nt, Homo sapiens
caauucaauacagauca

SEQ ID NO: 42155 - RNA, 14 nt, Homo sapiens
caauuccucuggga

SEQ ID NO: 42156 - RNA, 15 nt, Homo sapiens
caauuccucugggaa

SEQ ID NO: 42157 - RNA, 23 nt, Homo sapiens
caauuuaaaaaaaaaccugagcc

SEQ ID NO: 42158 - RNA, 16 nt, Homo sapiens
caauuugaauauaaau

SEQ ID NO: 42159 - RNA, 20 nt, Homo sapiens
caauuuggcagugauauuca

SEQ ID NO: 42160 - RNA, 19 nt, Homo sapiens
caauuuuaaggcauauuua

SEQ ID NO: 42161 - RNA, 15 nt, Homo sapiens
cacaaacucauccau

SEQ ID NO: 42162 - RNA, 18 nt, Homo sapiens
cacaaacucauccauuaa

SEQ ID NO: 42163 - RNA, 14 nt, Homo sapiens
cacaaaucuuaacu

SEQ ID NO: 42164 - RNA, 16 nt, Homo sapiens
cacaaccacucauuca

SEQ ID NO: 42165 - RNA, 17 nt, Homo sapiens
cacaaccacucauucaa

SEQ ID NO: 42166 - RNA, 14 nt, Homo sapiens
cacaaccuguccca

SEQ ID NO: 42167 - RNA, 21 nt, Homo sapiens
cacaacuauauuaucaugcaa

SEQ ID NO: 42168 - RNA, 19 nt, Homo sapiens
cacaagaaaugaaagcagg

SEQ ID NO: 42169 - RNA, 16 nt, Homo sapiens
cacaagacugcacauc

SEQ ID NO: 42170 - RNA, 17 nt, Homo sapiens
cacaagacugcacauca

SEQ ID NO: 42171 - RNA, 12 nt, Homo sapiens
cacaagcacuuu

SEQ ID NO: 42172 - RNA, 22 nt, Homo sapiens
cacaccccagacgaugucuuca

SEQ ID NO: 42173 - RNA, 16 nt, Homo sapiens
cacacuguccuauuau

SEQ ID NO: 42174 - RNA, 13 nt, Homo sapiens
cacacuuuugguu

SEQ ID NO: 42175 - RNA, 17 nt, Homo sapiens
cacagaccuuugaacua

SEQ ID NO: 42176 - RNA, 16 nt, Homo sapiens
cacagauaccucucuu

SEQ ID NO: 42177 - RNA, 21 nt, Homo sapiens
cacagcaagggugaugggaaa

SEQ ID NO: 42178 - RNA, 20 nt, Homo sapiens
cacagcugaacuuguugaga

SEQ ID NO: 42179 - RNA, 23 nt, Homo sapiens
cacagcugaacuuguugagaucc

SEQ ID NO: 42180 - RNA, 11 nt, Homo sapiens
cacaggacagc

SEQ ID NO: 42181 - RNA, 18 nt, Homo sapiens
cacaggcuccaaacugga

SEQ ID NO: 42182 - RNA, 20 nt, Homo sapiens
cacaggcuccaaacuggagc

SEQ ID NO: 42183 - RNA, 14 nt, Homo sapiens
cacaggggacagga

SEQ ID NO: 42184 - RNA, 16 nt, Homo sapiens
cacagucacauuccaa

SEQ ID NO: 42185 - RNA, 15 nt, Homo sapiens
cacagugucuggcac

SEQ ID NO: 42186 - RNA, 18 nt, Homo sapiens
cacaguguguggucaaca

SEQ ID NO: 42187 - RNA, 14 nt, Homo sapiens
cacaguuuugguug

SEQ ID NO: 42188 - RNA, 19 nt, Homo sapiens
cacaguuuugguugcuuua

SEQ ID NO: 42189 - RNA, 17 nt, Homo sapiens
cacaugcaaggucauuu

SEQ ID NO: 42190 - RNA, 23 nt, Homo sapiens
cacauggcuucaccuguccccga

SEQ ID NO: 42191 - RNA, 24 nt, Homo sapiens
cacauggcuucaccuguccccgaa

SEQ ID NO: 42192 - RNA, 22 nt, Homo sapiens
cacaugucagccacugugauag

SEQ ID NO: 42193 - RNA, 21 nt, Homo sapiens
cacauuccugaacaggauauu

SEQ ID NO: 42194 - RNA, 19 nt, Homo sapiens
cacauuggcuauuuaaaga

SEQ ID NO: 42195 - RNA, 17 nt, Homo sapiens
cacauuuuucagauaua

SEQ ID NO: 42196 - RNA, 12 nt, Homo sapiens
caccaaggcuga

SEQ ID NO: 42197 - RNA, 11 nt, Homo sapiens
caccaauauuc

SEQ ID NO: 42198 - RNA, 10 nt, Homo sapiens
caccaccacc

SEQ ID NO: 42199 - RNA, 11 nt, Homo sapiens
caccaccaccc

SEQ ID NO: 42200 - RNA, 13 nt, Homo sapiens
caccaccacccuu

SEQ ID NO: 42201 - RNA, 19 nt, Homo sapiens
caccacccuugccauggag

SEQ ID NO: 42202 - RNA, 14 nt, Homo sapiens
caccacgcccagcu

SEQ ID NO: 42203 - RNA, 16 nt, Homo sapiens
caccagggccuggcug

SEQ ID NO: 42204 - RNA, 17 nt, Homo sapiens
caccagggccuggcugg

SEQ ID NO: 42205 - RNA, 19 nt, Homo sapiens
caccagggccuggcuggga

SEQ ID NO: 42206 - RNA, 23 nt, Homo sapiens
caccagggccuggcugggagugg

SEQ ID NO: 42207 - RNA, 22 nt, Homo sapiens
caccauuccuucugcccugcuu

SEQ ID NO: 42208 - RNA, 12 nt, Homo sapiens
cacccccagaau

SEQ ID NO: 42209 - RNA, 13 nt, Homo sapiens
cacccgcccaccg

SEQ ID NO: 42210 - RNA, 18 nt, Homo sapiens
cacccgcccaccgcaggg

SEQ ID NO: 42211 - RNA, 14 nt, Homo sapiens
cacccuugccaugg

SEQ ID NO: 42212 - RNA, 22 nt, Homo sapiens
cacccuugccauggagguuaag

SEQ ID NO: 42213 - RNA, 17 nt, Homo sapiens
caccgcagggugaacug

SEQ ID NO: 42214 - RNA, 14 nt, Homo sapiens
caccgcuguacgcg

SEQ ID NO: 42215 - RNA, 20 nt, Homo sapiens
caccgcuguacgcgagcgcg

SEQ ID NO: 42216 - RNA, 23 nt, Homo sapiens
caccgcuguacgcgagcgcgcgc

SEQ ID NO: 42217 - RNA, 21 nt, Homo sapiens
caccucagcugccuccccagc

SEQ ID NO: 42218 - RNA, 22 nt, Homo sapiens
caccucagcugccuccccagcu

SEQ ID NO: 42219 - RNA, 17 nt, Homo sapiens
caccucauggaauugga

SEQ ID NO: 42220 - RNA, 12 nt, Homo sapiens
caccucccauuc

SEQ ID NO: 42221 - RNA, 17 nt, Homo sapiens
caccuccugccucaggu

SEQ ID NO: 42222 - RNA, 11 nt, Homo sapiens
caccugcaggc

SEQ ID NO: 42223 - RNA, 14 nt, Homo sapiens
caccugcaggcgug

SEQ ID NO: 42224 - RNA, 15 nt, Homo sapiens
caccugcaggcguga

SEQ ID NO: 42225 - RNA, 17 nt, Homo sapiens
caccugcaggcgugacc

SEQ ID NO: 42226 - RNA, 21 nt, Homo sapiens
caccuggaauauauaaccagu

SEQ ID NO: 42227 - RNA, 13 nt, Homo sapiens
caccuguaauccc

SEQ ID NO: 42228 - RNA, 14 nt, Homo sapiens
caccugugagacca

SEQ ID NO: 42229 - RNA, 13 nt, Homo sapiens
caccugugccguc

SEQ ID NO: 42230 - RNA, 20 nt, Homo sapiens
caccuguuuuuaagcuguuu

SEQ ID NO: 42231 - RNA, 21 nt, Homo sapiens
caccuguuuuuaagcuguuuc

SEQ ID NO: 42232 - RNA, 21 nt, Homo sapiens
caccuuacuucuucucauacu

SEQ ID NO: 42233 - RNA, 18 nt, Homo sapiens
caccuuaucuauguagaa

SEQ ID NO: 42234 - RNA, 19 nt, Homo sapiens
caccuuaucuauguagaau

SEQ ID NO: 42235 - RNA, 14 nt, Homo sapiens
caccuucuggguuc

SEQ ID NO: 42236 - RNA, 21 nt, Homo sapiens
caccuucuggguucaagcgau

SEQ ID NO: 42237 - RNA, 22 nt, Homo sapiens
caccuucuggguucaagcgauu

SEQ ID NO: 42238 - RNA, 16 nt, Homo sapiens
caccuuuuggucugga

SEQ ID NO: 42239 - RNA, 19 nt, Homo sapiens
cacgccuguaaucccagca

SEQ ID NO: 42240 - RNA, 22 nt, Homo sapiens
cacgccuguaaucccagcacuu

SEQ ID NO: 42241 - RNA, 15 nt, Homo sapiens
cacgcucugggucgc

SEQ ID NO: 42242 - RNA, 17 nt, Homo sapiens
cacgcucugggucgccg

SEQ ID NO: 42243 - RNA, 19 nt, Homo sapiens
cacgcucugggucgccggc

SEQ ID NO: 42244 - RNA, 14 nt, Homo sapiens
cacggcuggagcug

SEQ ID NO: 42245 - RNA, 15 nt, Homo sapiens
cacuaaaaaggcaug

SEQ ID NO: 42246 - RNA, 22 nt, Homo sapiens
cacuaaaacaccucagcugccu

SEQ ID NO: 42247 - RNA, 22 nt, Homo sapiens
cacuacagcugagcagauguaa

SEQ ID NO: 42248 - RNA, 14 nt, Homo sapiens
cacuacauucuguu

SEQ ID NO: 42249 - RNA, 20 nt, Homo sapiens
cacuagcuaauaucaauaga

SEQ ID NO: 42250 - RNA, 13 nt, Homo sapiens
cacuagggcaggg

SEQ ID NO: 42251 - RNA, 11 nt, Homo sapiens
cacuaguauuu

SEQ ID NO: 42252 - RNA, 16 nt, Homo sapiens
cacucauuuauuucca

SEQ ID NO: 42253 - RNA, 23 nt, Homo sapiens
cacuccacuuggacaugggcccc

SEQ ID NO: 42254 - RNA, 13 nt, Homo sapiens
cacuccagccuga

SEQ ID NO: 42255 - RNA, 23 nt, Homo sapiens
cacugacuucuaaguaaaaccac

SEQ ID NO: 42256 - RNA, 16 nt, Homo sapiens
cacugcagaagacagu

SEQ ID NO: 42257 - RNA, 16 nt, Homo sapiens
cacugcuuaacuucac

SEQ ID NO: 42258 - RNA, 13 nt, Homo sapiens
cacuggcucccug

SEQ ID NO: 42259 - RNA, 17 nt, Homo sapiens
cacuggcuguuaaucuu

SEQ ID NO: 42260 - RNA, 21 nt, Homo sapiens
cacuggcuguuaaucuuucaa

SEQ ID NO: 42261 - RNA, 18 nt, Homo sapiens
cacuguuaucuucacuuu

SEQ ID NO: 42262 - RNA, 12 nt, Homo sapiens
cacuuacaauuu

SEQ ID NO: 42263 - RNA, 20 nt, Homo sapiens
cacuuauaggaauugaccca

SEQ ID NO: 42264 - RNA, 12 nt, Homo sapiens
cacuucacuuuu

SEQ ID NO: 42265 - RNA, 14 nt, Homo sapiens
cacuuccaagaucu

SEQ ID NO: 42266 - RNA, 14 nt, Homo sapiens
cacuuccucccggc

SEQ ID NO: 42267 - RNA, 15 nt, Homo sapiens
cacuuccucccggcc

SEQ ID NO: 42268 - RNA, 16 nt, Homo sapiens
cacuuccucccggccg

SEQ ID NO: 42269 - RNA, 17 nt, Homo sapiens
cacuuccucccggccgc

SEQ ID NO: 42270 - RNA, 19 nt, Homo sapiens
cacuuccucccggccgcgc

SEQ ID NO: 42271 - RNA, 20 nt, Homo sapiens
cacuuccucccggccgcgcu

SEQ ID NO: 42272 - RNA, 12 nt, Homo sapiens
cacuugaacccg

SEQ ID NO: 42273 - RNA, 15 nt, Homo sapiens
cacuugaacccggga

SEQ ID NO: 42274 - RNA, 15 nt, Homo sapiens
cacuugaugauacaa

SEQ ID NO: 42275 - RNA, 23 nt, Homo sapiens
cacuuggacaugggccccagaua

SEQ ID NO: 42276 - RNA, 13 nt, Homo sapiens
cacuugucaauaa

SEQ ID NO: 42277 - RNA, 20 nt, Homo sapiens
cacuuguguuuugcaagcca

SEQ ID NO: 42278 - RNA, 17 nt, Homo sapiens
cacuuuaacacaguguc

SEQ ID NO: 42279 - RNA, 20 nt, Homo sapiens
cacuuuaacacagugucugg

SEQ ID NO: 42280 - RNA, 15 nt, Homo sapiens
cacuuuagaaagcug

SEQ ID NO: 42281 - RNA, 18 nt, Homo sapiens
cagaaagcagaacaguga

SEQ ID NO: 42282 - RNA, 14 nt, Homo sapiens
cagaaauguguuau

SEQ ID NO: 42283 - RNA, 15 nt, Homo sapiens
cagaaauuguaucuu

SEQ ID NO: 42284 - RNA, 15 nt, Homo sapiens
cagaaauuuaauuca

SEQ ID NO: 42285 - RNA, 11 nt, Homo sapiens
cagaacaguga

SEQ ID NO: 42286 - RNA, 12 nt, Homo sapiens
cagaacagugau

SEQ ID NO: 42287 - RNA, 14 nt, Homo sapiens
cagaacuugaaugu

SEQ ID NO: 42288 - RNA, 21 nt, Homo sapiens
cagaacuugaaugugucaggu

SEQ ID NO: 42289 - RNA, 20 nt, Homo sapiens
cagaagcaacccaaauguuc

SEQ ID NO: 42290 - RNA, 14 nt, Homo sapiens
cagaagucaaggcu

SEQ ID NO: 42291 - RNA, 10 nt, Homo sapiens
cagaauuucu

SEQ ID NO: 42292 - RNA, 19 nt, Homo sapiens
cagacauacuaaccagcag

SEQ ID NO: 42293 - RNA, 21 nt, Homo sapiens
cagaccuuugaacuagaguuu

SEQ ID NO: 42294 - RNA, 15 nt, Homo sapiens
cagacucuggucaag

SEQ ID NO: 42295 - RNA, 16 nt, Homo sapiens
cagagaaaauaaaagc

SEQ ID NO: 42296 - RNA, 18 nt, Homo sapiens
cagagaaaauaaaagcac

SEQ ID NO: 42297 - RNA, 19 nt, Homo sapiens
cagagaaaauaaaagcacu

SEQ ID NO: 42298 - RNA, 20 nt, Homo sapiens
cagagaaaauaaaagcacuu

SEQ ID NO: 42299 - RNA, 16 nt, Homo sapiens
cagagaccaguauucc

SEQ ID NO: 42300 - RNA, 21 nt, Homo sapiens
cagagacgggguuugccaugc

SEQ ID NO: 42301 - RNA, 23 nt, Homo sapiens
cagagacgggguuugccaugcug

SEQ ID NO: 42302 - RNA, 21 nt, Homo sapiens
cagauaaauaguuuaugauuc

SEQ ID NO: 42303 - RNA, 15 nt, Homo sapiens
cagauaugauucaaa

SEQ ID NO: 42304 - RNA, 17 nt, Homo sapiens
cagauauucucuaguca

SEQ ID NO: 42305 - RNA, 16 nt, Homo sapiens
cagaucaagccugccu

SEQ ID NO: 42306 - RNA, 21 nt, Homo sapiens
cagaucaguuuagcaaaucua

SEQ ID NO: 42307 - RNA, 14 nt, Homo sapiens
cagaucauuucaaa

SEQ ID NO: 42308 - RNA, 16 nt, Homo sapiens
cagaucauuucaaaac

SEQ ID NO: 42309 - RNA, 17 nt, Homo sapiens
cagauccuggaaaucag

SEQ ID NO: 42310 - RNA, 17 nt, Homo sapiens
cagcaauaaagcagcgu

SEQ ID NO: 42311 - RNA, 18 nt, Homo sapiens
cagcaauaaagcagcguu

SEQ ID NO: 42312 - RNA, 22 nt, Homo sapiens
cagcaauaaagcagcguuucua

SEQ ID NO: 42313 - RNA, 23 nt, Homo sapiens
cagcacagccucuuagaugcagu

SEQ ID NO: 42314 - RNA, 14 nt, Homo sapiens
cagcacgauuucug

SEQ ID NO: 42315 - RNA, 15 nt, Homo sapiens
cagcacuuacaauuu

SEQ ID NO: 42316 - RNA, 13 nt, Homo sapiens
cagcacuuuggga

SEQ ID NO: 42317 - RNA, 21 nt, Homo sapiens
cagcaguugaaaagacuccaa

SEQ ID NO: 42318 - RNA, 17 nt, Homo sapiens
cagcauuuuacuacuuu

SEQ ID NO: 42319 - RNA, 20 nt, Homo sapiens
cagcauuuuacuacuuuaaa

SEQ ID NO: 42320 - RNA, 12 nt, Homo sapiens
cagccaaccugg

SEQ ID NO: 42321 - RNA, 14 nt, Homo sapiens
cagccaaccugggg

SEQ ID NO: 42322 - RNA, 22 nt, Homo sapiens
cagccacugugauagaggcuga

SEQ ID NO: 42323 - RNA, 15 nt, Homo sapiens
cagccagcacagccu

SEQ ID NO: 42324 - RNA, 16 nt, Homo sapiens
cagccaggcggcugga

SEQ ID NO: 42325 - RNA, 18 nt, Homo sapiens
cagccaggcggcuggaau

SEQ ID NO: 42326 - RNA, 15 nt, Homo sapiens
cagcccaaggguggg

SEQ ID NO: 42327 - RNA, 16 nt, Homo sapiens
cagcccaagggugggu

SEQ ID NO: 42328 - RNA, 15 nt, Homo sapiens
cagccccugggacca

SEQ ID NO: 42329 - RNA, 16 nt, Homo sapiens
cagcccuucuuuccac

SEQ ID NO: 42330 - RNA, 16 nt, Homo sapiens
cagccucagcucucag

SEQ ID NO: 42331 - RNA, 17 nt, Homo sapiens
cagccucagcucucagu

SEQ ID NO: 42332 - RNA, 20 nt, Homo sapiens
cagccucuuagaugcaguuc

SEQ ID NO: 42333 - RNA, 21 nt, Homo sapiens
cagccucuuagaugcaguucu

SEQ ID NO: 42334 - RNA, 14 nt, Homo sapiens
cagccugggugaca

SEQ ID NO: 42335 - RNA, 15 nt, Homo sapiens
cagccugggugacag

SEQ ID NO: 42336 - RNA, 19 nt, Homo sapiens
cagccugggugacagagca

SEQ ID NO: 42337 - RNA, 21 nt, Homo sapiens
cagccuggucaacauggugaa

SEQ ID NO: 42338 - RNA, 19 nt, Homo sapiens
cagccuuggauacuccaug

SEQ ID NO: 42339 - RNA, 17 nt, Homo sapiens
cagcgaguacuucccgc

SEQ ID NO: 42340 - RNA, 23 nt, Homo sapiens
cagcgaguacuucccgcuguucc

SEQ ID NO: 42341 - RNA, 22 nt, Homo sapiens
cagcguuucuaugacacaugca

SEQ ID NO: 42342 - RNA, 13 nt, Homo sapiens
cagcuaaguugca

SEQ ID NO: 42343 - RNA, 13 nt, Homo sapiens
cagcuacuuggga

SEQ ID NO: 42344 - RNA, 18 nt, Homo sapiens
cagcuagaauucacucca

SEQ ID NO: 42345 - RNA, 19 nt, Homo sapiens
cagcuagaauucacuccac

SEQ ID NO: 42346 - RNA, 15 nt, Homo sapiens
cagcucuaaauguca

SEQ ID NO: 42347 - RNA, 23 nt, Homo sapiens
cagcucuaucccaaccucuccca

SEQ ID NO: 42348 - RNA, 15 nt, Homo sapiens
cagcucucaguugca

SEQ ID NO: 42349 - RNA, 18 nt, Homo sapiens
cagcucucaguugcagcc

SEQ ID NO: 42350 - RNA, 14 nt, Homo sapiens
cagcugagcagaug

SEQ ID NO: 42351 - RNA, 15 nt, Homo sapiens
cagcugagcagaugu

SEQ ID NO: 42352 - RNA, 20 nt, Homo sapiens
cagcugagcagauguaauag

SEQ ID NO: 42353 - RNA, 15 nt, Homo sapiens
cagcugccccgggga

SEQ ID NO: 42354 - RNA, 21 nt, Homo sapiens
cagcugccccggggaggggcg

SEQ ID NO: 42355 - RNA, 20 nt, Homo sapiens
cagcugccuccccagcucua

SEQ ID NO: 42356 - RNA, 22 nt, Homo sapiens
cagcugccuccccagcucuauc

SEQ ID NO: 42357 - RNA, 19 nt, Homo sapiens
cagcuguaugauucccagc

SEQ ID NO: 42358 - RNA, 13 nt, Homo sapiens
cagcuuauugucu

SEQ ID NO: 42359 - RNA, 10 nt, Homo sapiens
caggaaaaua

SEQ ID NO: 42360 - RNA, 15 nt, Homo sapiens
caggaaaaucugcac

SEQ ID NO: 42361 - RNA, 23 nt, Homo sapiens
caggaaagagaacuuccagaucc

SEQ ID NO: 42362 - RNA, 18 nt, Homo sapiens
caggaaccacaagacugc

SEQ ID NO: 42363 - RNA, 20 nt, Homo sapiens
caggaaguagaggaggccac

SEQ ID NO: 42364 - RNA, 15 nt, Homo sapiens
caggaccaucccggc

SEQ ID NO: 42365 - RNA, 22 nt, Homo sapiens
caggaccaucccggccggcgcg

SEQ ID NO: 42366 - RNA, 23 nt, Homo sapiens
caggaccaucccggccggcgcgc

SEQ ID NO: 42367 - RNA, 14 nt, Homo sapiens
caggaggcauccaa

SEQ ID NO: 42368 - RNA, 18 nt, Homo sapiens
caggaguuccuaaccagc

SEQ ID NO: 42369 - RNA, 16 nt, Homo sapiens
caggaguuuggccaga

SEQ ID NO: 42370 - RNA, 13 nt, Homo sapiens
caggaugcccacg

SEQ ID NO: 42371 - RNA, 21 nt, Homo sapiens
caggaugcccacggcuggagc

SEQ ID NO: 42372 - RNA, 22 nt, Homo sapiens
caggauggcaggaggcauccaa

SEQ ID NO: 42373 - RNA, 23 nt, Homo sapiens
caggauggcaggaggcauccaaa

SEQ ID NO: 42374 - RNA, 16 nt, Homo sapiens
caggauuuaaguuuca

SEQ ID NO: 42375 - RNA, 14 nt, Homo sapiens
caggcacccccaga

SEQ ID NO: 42376 - RNA, 13 nt, Homo sapiens
caggcaucgccau

SEQ ID NO: 42377 - RNA, 17 nt, Homo sapiens
caggccccaucuggucc

SEQ ID NO: 42378 - RNA, 18 nt, Homo sapiens
caggccccaucugguccu

SEQ ID NO: 42379 - RNA, 15 nt, Homo sapiens
caggcggguccgggu

SEQ ID NO: 42380 - RNA, 22 nt, Homo sapiens
caggcggguccgggucgcagga

SEQ ID NO: 42381 - RNA, 20 nt, Homo sapiens
caggcgugaccugacagccc

SEQ ID NO: 42382 - RNA, 15 nt, Homo sapiens
caggcgugagccacc

SEQ ID NO: 42383 - RNA, 16 nt, Homo sapiens
caggcgugagccacca

SEQ ID NO: 42384 - RNA, 17 nt, Homo sapiens
caggcgugagccaccaa

SEQ ID NO: 42385 - RNA, 18 nt, Homo sapiens
caggcgugagccaccaaa

SEQ ID NO: 42386 - RNA, 23 nt, Homo sapiens
caggcgugagccaccaaacccgg

SEQ ID NO: 42387 - RNA, 17 nt, Homo sapiens
caggcuacugucagcuc

SEQ ID NO: 42388 - RNA, 15 nt, Homo sapiens
caggcuagauguaug

SEQ ID NO: 42389 - RNA, 15 nt, Homo sapiens
caggcuccaaacugg

SEQ ID NO: 42390 - RNA, 18 nt, Homo sapiens
caggcuccaaacuggagc

SEQ ID NO: 42391 - RNA, 22 nt, Homo sapiens
caggcuccaaacuggagcuuga

SEQ ID NO: 42392 - RNA, 13 nt, Homo sapiens
caggcuggcaccg

SEQ ID NO: 42393 - RNA, 14 nt, Homo sapiens
caggcuggcaccgc

SEQ ID NO: 42394 - RNA, 15 nt, Homo sapiens
caggcuggcaccgcu

SEQ ID NO: 42395 - RNA, 20 nt, Homo sapiens
caggcuggcaccgcuguacg

SEQ ID NO: 42396 - RNA, 14 nt, Homo sapiens
caggcuggucucga

SEQ ID NO: 42397 - RNA, 24 nt, Homo sapiens
caggcuggucucgaacugcuggau

SEQ ID NO: 42398 - RNA, 17 nt, Homo sapiens
cagggaaagggucuccc

SEQ ID NO: 42399 - RNA, 18 nt, Homo sapiens
cagggaaauguaugugug

SEQ ID NO: 42400 - RNA, 13 nt, Homo sapiens
cagggagccccuu

SEQ ID NO: 42401 - RNA, 15 nt, Homo sapiens
cagggccuggcuggg

SEQ ID NO: 42402 - RNA, 18 nt, Homo sapiens
cagggccuggcugggagu

SEQ ID NO: 42403 - RNA, 20 nt, Homo sapiens
cagggccuggcugggagugg

SEQ ID NO: 42404 - RNA, 16 nt, Homo sapiens
cagggcuacgcgcgcu

SEQ ID NO: 42405 - RNA, 20 nt, Homo sapiens
cagggcuacgcgcgcuccgc

SEQ ID NO: 42406 - RNA, 17 nt, Homo sapiens
cagggugaacugcagcg

SEQ ID NO: 42407 - RNA, 22 nt, Homo sapiens
cagggugaacugcagcgaguac

SEQ ID NO: 42408 - RNA, 23 nt, Homo sapiens
caggguuaguauuguccaggucu

SEQ ID NO: 42409 - RNA, 12 nt, Homo sapiens
caggucacacaa

SEQ ID NO: 42410 - RNA, 11 nt, Homo sapiens
caggucuacca

SEQ ID NO: 42411 - RNA, 19 nt, Homo sapiens
caggugccaguuauggcua

SEQ ID NO: 42412 - RNA, 22 nt, Homo sapiens
caguaacggaacaguauccagu

SEQ ID NO: 42413 - RNA, 12 nt, Homo sapiens
caguaacugaca

SEQ ID NO: 42414 - RNA, 20 nt, Homo sapiens
caguaguuagcuuucuuccu

SEQ ID NO: 42415 - RNA, 15 nt, Homo sapiens
caguauccaguacuc

SEQ ID NO: 42416 - RNA, 17 nt, Homo sapiens
caguaugaaaaugucau

SEQ ID NO: 42417 - RNA, 21 nt, Homo sapiens
caguaugaaaaugucauuguu

SEQ ID NO: 42418 - RNA, 17 nt, Homo sapiens
cagucacauuccaagcc

SEQ ID NO: 42419 - RNA, 16 nt, Homo sapiens
cagucaccucauggaa

SEQ ID NO: 42420 - RNA, 17 nt, Homo sapiens
cagucauucagauauga

SEQ ID NO: 42421 - RNA, 17 nt, Homo sapiens
cagucugacuguuucca

SEQ ID NO: 42422 - RNA, 19 nt, Homo sapiens
cagucugacuguuuccauc

SEQ ID NO: 42423 - RNA, 17 nt, Homo sapiens
cagugagaucaauguga

SEQ ID NO: 42424 - RNA, 15 nt, Homo sapiens
cagugagccgagauu

SEQ ID NO: 42425 - RNA, 16 nt, Homo sapiens
cagugagccgagauug

SEQ ID NO: 42426 - RNA, 18 nt, Homo sapiens
cagugaggcggauugaga

SEQ ID NO: 42427 - RNA, 23 nt, Homo sapiens
cagugaucaaguuauuuuuaauu

SEQ ID NO: 42428 - RNA, 16 nt, Homo sapiens
cagugauuaccaggga

SEQ ID NO: 42429 - RNA, 12 nt, Homo sapiens
cagugcuuggcc

SEQ ID NO: 42430 - RNA, 17 nt, Homo sapiens
cagugcuuggcccagga

SEQ ID NO: 42431 - RNA, 18 nt, Homo sapiens
cagugcuuggcccaggag

SEQ ID NO: 42432 - RNA, 23 nt, Homo sapiens
cagugcuuuccguggcacugcau

SEQ ID NO: 42433 - RNA, 13 nt, Homo sapiens
caguguacagucu

SEQ ID NO: 42434 - RNA, 14 nt, Homo sapiens
caguguacagucuu

SEQ ID NO: 42435 - RNA, 17 nt, Homo sapiens
cagugucaaugcagccc

SEQ ID NO: 42436 - RNA, 22 nt, Homo sapiens
cagugucaaugcagcccccauu

SEQ ID NO: 42437 - RNA, 17 nt, Homo sapiens
caguguccucaucugua

SEQ ID NO: 42438 - RNA, 22 nt, Homo sapiens
cagugucuggcacuugggacaa

SEQ ID NO: 42439 - RNA, 23 nt, Homo sapiens
caguuacucugaagggcaucaug

SEQ ID NO: 42440 - RNA, 20 nt, Homo sapiens
caguuauuuuuaaacuguaa

SEQ ID NO: 42441 - RNA, 18 nt, Homo sapiens
caguuccugagaccagcc

SEQ ID NO: 42442 - RNA, 19 nt, Homo sapiens
caguuccugagaccagcca

SEQ ID NO: 42443 - RNA, 20 nt, Homo sapiens
caguuccugagaccagccaa

SEQ ID NO: 42444 - RNA, 21 nt, Homo sapiens
caguuccugagaccagccaac

SEQ ID NO: 42445 - RNA, 22 nt, Homo sapiens
caguuccugagaccagccaacc

SEQ ID NO: 42446 - RNA, 23 nt, Homo sapiens
caguuccugagaccagccaaccu

SEQ ID NO: 42447 - RNA, 15 nt, Homo sapiens
caguucugaagaaga

SEQ ID NO: 42448 - RNA, 13 nt, Homo sapiens
caguugaaaagac

SEQ ID NO: 42449 - RNA, 22 nt, Homo sapiens
caguuguuauuuauugaaauga

SEQ ID NO: 42450 - RNA, 20 nt, Homo sapiens
cauaaacaagaccacguuuc

SEQ ID NO: 42451 - RNA, 21 nt, Homo sapiens
cauaaacaagaccacguuucu

SEQ ID NO: 42452 - RNA, 22 nt, Homo sapiens
cauaaauuagaggucuccaaaa

SEQ ID NO: 42453 - RNA, 17 nt, Homo sapiens
cauaaauuuaguauuuu

SEQ ID NO: 42454 - RNA, 18 nt, Homo sapiens
cauaaccccggaagccaa

SEQ ID NO: 42455 - RNA, 18 nt, Homo sapiens
cauaagcaaagacuauga

SEQ ID NO: 42456 - RNA, 16 nt, Homo sapiens
cauaauuacuauguca

SEQ ID NO: 42457 - RNA, 13 nt, Homo sapiens
cauacauguuaca

SEQ ID NO: 42458 - RNA, 13 nt, Homo sapiens
cauacauuugugu

SEQ ID NO: 42459 - RNA, 13 nt, Homo sapiens
cauacuaaccagc

SEQ ID NO: 42460 - RNA, 13 nt, Homo sapiens
cauagagacuuug

SEQ ID NO: 42461 - RNA, 20 nt, Homo sapiens
cauagauucccugagcagga

SEQ ID NO: 42462 - RNA, 20 nt, Homo sapiens
cauagcagauuuuaauuuug

SEQ ID NO: 42463 - RNA, 14 nt, Homo sapiens
cauagggugacaca

SEQ ID NO: 42464 - RNA, 17 nt, Homo sapiens
cauaguaccucugcuau

SEQ ID NO: 42465 - RNA, 20 nt, Homo sapiens
cauauccuuagcccaucuuu

SEQ ID NO: 42466 - RNA, 20 nt, Homo sapiens
cauauguuuuuguaaguuua

SEQ ID NO: 42467 - RNA, 11 nt, Homo sapiens
cauauuaaaau

SEQ ID NO: 42468 - RNA, 16 nt, Homo sapiens
cauauuaccacagaca

SEQ ID NO: 42469 - RNA, 18 nt, Homo sapiens
cauauugaugugugucua

SEQ ID NO: 42470 - RNA, 14 nt, Homo sapiens
cauauuuaacaaaa

SEQ ID NO: 42471 - RNA, 16 nt, Homo sapiens
cauauuuuauuauagu

SEQ ID NO: 42472 - RNA, 19 nt, Homo sapiens
cauauuuuauuauagucac

SEQ ID NO: 42473 - RNA, 19 nt, Homo sapiens
caucaaggguacacugccu

SEQ ID NO: 42474 - RNA, 21 nt, Homo sapiens
caucaaggguacacugccuuc

SEQ ID NO: 42475 - RNA, 14 nt, Homo sapiens
caucaaugaaugaa

SEQ ID NO: 42476 - RNA, 15 nt, Homo sapiens
caucaaugaaugaau

SEQ ID NO: 42477 - RNA, 18 nt, Homo sapiens
caucaaugaaugaaugaa

SEQ ID NO: 42478 - RNA, 13 nt, Homo sapiens
caucacaguuuug

SEQ ID NO: 42479 - RNA, 14 nt, Homo sapiens
caucagcacgauuu

SEQ ID NO: 42480 - RNA, 18 nt, Homo sapiens
caucagcacgauuucugu

SEQ ID NO: 42481 - RNA, 24 nt, Homo sapiens
caucagcacgauuucuguuuagau

SEQ ID NO: 42482 - RNA, 18 nt, Homo sapiens
caucaguauugaagcauu

SEQ ID NO: 42483 - RNA, 13 nt, Homo sapiens
cauccacuuucca

SEQ ID NO: 42484 - RNA, 15 nt, Homo sapiens
cauccagauagguua

SEQ ID NO: 42485 - RNA, 18 nt, Homo sapiens
caucccggccggcgcgcu

SEQ ID NO: 42486 - RNA, 22 nt, Homo sapiens
caucccggccggcgcgcucauc

SEQ ID NO: 42487 - RNA, 17 nt, Homo sapiens
cauccuagucucuauca

SEQ ID NO: 42488 - RNA, 22 nt, Homo sapiens
cauccuagucucuaucauuaaa

SEQ ID NO: 42489 - RNA, 19 nt, Homo sapiens
cauccugccccugagccca

SEQ ID NO: 42490 - RNA, 22 nt, Homo sapiens
cauccugccccugagcccaugg

SEQ ID NO: 42491 - RNA, 16 nt, Homo sapiens
cauccugugggaccug

SEQ ID NO: 42492 - RNA, 11 nt, Homo sapiens
caucucugcaa

SEQ ID NO: 42493 - RNA, 15 nt, Homo sapiens
caucuguaaaaugga

SEQ ID NO: 42494 - RNA, 16 nt, Homo sapiens
caucuguaaaauggag

SEQ ID NO: 42495 - RNA, 12 nt, Homo sapiens
caucuucuuuca

SEQ ID NO: 42496 - RNA, 19 nt, Homo sapiens
caucuuggucacauacaau

SEQ ID NO: 42497 - RNA, 18 nt, Homo sapiens
caucuuucaagggaccuc

SEQ ID NO: 42498 - RNA, 19 nt, Homo sapiens
caucuuucaagggaccucu

SEQ ID NO: 42499 - RNA, 21 nt, Homo sapiens
caucuuucaagggaccucucc

SEQ ID NO: 42500 - RNA, 23 nt, Homo sapiens
caucuuucaagggaccucuccau

SEQ ID NO: 42501 - RNA, 12 nt, Homo sapiens
caucuuucacau

SEQ ID NO: 42502 - RNA, 16 nt, Homo sapiens
caugaaaacacauuuu

SEQ ID NO: 42503 - RNA, 13 nt, Homo sapiens
caugaaagcguaa

SEQ ID NO: 42504 - RNA, 16 nt, Homo sapiens
caugaaggggcggcgg

SEQ ID NO: 42505 - RNA, 17 nt, Homo sapiens
caugaaggggcggcggc

SEQ ID NO: 42506 - RNA, 18 nt, Homo sapiens
caugaaggggcggcggcc

SEQ ID NO: 42507 - RNA, 20 nt, Homo sapiens
caugaaggggcggcggcccu

SEQ ID NO: 42508 - RNA, 21 nt, Homo sapiens
caugaaggggcggcggcccug

SEQ ID NO: 42509 - RNA, 19 nt, Homo sapiens
caugaaguaauaugcacac

SEQ ID NO: 42510 - RNA, 15 nt, Homo sapiens
caugaaguccaagca

SEQ ID NO: 42511 - RNA, 17 nt, Homo sapiens
caugaauuaguuuuaua

SEQ ID NO: 42512 - RNA, 19 nt, Homo sapiens
caugagagacagcaggucu

SEQ ID NO: 42513 - RNA, 12 nt, Homo sapiens
caugagccuuug

SEQ ID NO: 42514 - RNA, 16 nt, Homo sapiens
caugaucccaccuccc

SEQ ID NO: 42515 - RNA, 20 nt, Homo sapiens
caugauccugcaauuccacu

SEQ ID NO: 42516 - RNA, 20 nt, Homo sapiens
caugaugcugagcccggaaa

SEQ ID NO: 42517 - RNA, 21 nt, Homo sapiens
caugauguuuagaaacacaac

SEQ ID NO: 42518 - RNA, 16 nt, Homo sapiens
caugcaaggucauuuu

SEQ ID NO: 42519 - RNA, 21 nt, Homo sapiens
caugcucuccaaaccacuuuu

SEQ ID NO: 42520 - RNA, 13 nt, Homo sapiens
caugcugccaaua

SEQ ID NO: 42521 - RNA, 15 nt, Homo sapiens
caugcugccaauauc

SEQ ID NO: 42522 - RNA, 19 nt, Homo sapiens
caugcugccaauauccuaa

SEQ ID NO: 42523 - RNA, 13 nt, Homo sapiens
caugcuggccagg

SEQ ID NO: 42524 - RNA, 15 nt, Homo sapiens
caugcugucuacacu

SEQ ID NO: 42525 - RNA, 16 nt, Homo sapiens
caugcugucuacacua

SEQ ID NO: 42526 - RNA, 16 nt, Homo sapiens
cauggaauuggagcuc

SEQ ID NO: 42527 - RNA, 15 nt, Homo sapiens
cauggaucugguagg

SEQ ID NO: 42528 - RNA, 22 nt, Homo sapiens
cauggaucugguagggggaaaa

SEQ ID NO: 42529 - RNA, 19 nt, Homo sapiens
cauggcacucuauguucua

SEQ ID NO: 42530 - RNA, 14 nt, Homo sapiens
cauggcccugccau

SEQ ID NO: 42531 - RNA, 23 nt, Homo sapiens
cauggcuggagcuagaauuugau

SEQ ID NO: 42532 - RNA, 14 nt, Homo sapiens
caugggcacugugg

SEQ ID NO: 42533 - RNA, 23 nt, Homo sapiens
caugggccuagcccacuggcucc

SEQ ID NO: 42534 - RNA, 18 nt, Homo sapiens
caugguggcgcgcaccug

SEQ ID NO: 42535 - RNA, 15 nt, Homo sapiens
cauggugugcuggcu

SEQ ID NO: 42536 - RNA, 17 nt, Homo sapiens
cauggugugcuggcuua

SEQ ID NO: 42537 - RNA, 12 nt, Homo sapiens
cauguacaucca

SEQ ID NO: 42538 - RNA, 16 nt, Homo sapiens
cauguauuuguuugca

SEQ ID NO: 42539 - RNA, 19 nt, Homo sapiens
caugucagccacugugaua

SEQ ID NO: 42540 - RNA, 18 nt, Homo sapiens
caugugauuacccucugg

SEQ ID NO: 42541 - RNA, 19 nt, Homo sapiens
caugugauuacccucuggg

SEQ ID NO: 42542 - RNA, 11 nt, Homo sapiens
cauguuuucuu

SEQ ID NO: 42543 - RNA, 13 nt, Homo sapiens
cauuaaaguucua

SEQ ID NO: 42544 - RNA, 20 nt, Homo sapiens
cauuaaaguucuagugaccg

SEQ ID NO: 42545 - RNA, 20 nt, Homo sapiens
cauuaaauauaauaugcaca

SEQ ID NO: 42546 - RNA, 20 nt, Homo sapiens
cauuaauaauaaauucccug

SEQ ID NO: 42547 - RNA, 14 nt, Homo sapiens
cauuaguuuugaag

SEQ ID NO: 42548 - RNA, 15 nt, Homo sapiens
cauuaguuuugaaga

SEQ ID NO: 42549 - RNA, 18 nt, Homo sapiens
cauuauauuuauuacugu

SEQ ID NO: 42550 - RNA, 22 nt, Homo sapiens
cauuaucucaaaacugcacugu

SEQ ID NO: 42551 - RNA, 17 nt, Homo sapiens
cauuauuggacuuccau

SEQ ID NO: 42552 - RNA, 21 nt, Homo sapiens
cauuauuggacuuccauuugg

SEQ ID NO: 42553 - RNA, 16 nt, Homo sapiens
cauucacagauaccuc

SEQ ID NO: 42554 - RNA, 19 nt, Homo sapiens
cauucacagauaccucucu

SEQ ID NO: 42555 - RNA, 23 nt, Homo sapiens
cauucacagauaccucucuugua

SEQ ID NO: 42556 - RNA, 14 nt, Homo sapiens
cauucaggaugccc

SEQ ID NO: 42557 - RNA, 21 nt, Homo sapiens
cauucccguggaacguuuuuc

SEQ ID NO: 42558 - RNA, 17 nt, Homo sapiens
cauucuccuuguguuac

SEQ ID NO: 42559 - RNA, 18 nt, Homo sapiens
cauucuugaaagcugugg

SEQ ID NO: 42560 - RNA, 13 nt, Homo sapiens
cauucuuuuugaa

SEQ ID NO: 42561 - RNA, 20 nt, Homo sapiens
cauucuuuuugaaaugucaa

SEQ ID NO: 42562 - RNA, 15 nt, Homo sapiens
cauugagaacugcau

SEQ ID NO: 42563 - RNA, 23 nt, Homo sapiens
cauugagaacugcauauguuucg

SEQ ID NO: 42564 - RNA, 19 nt, Homo sapiens
cauuguaauugcuaucgcc

SEQ ID NO: 42565 - RNA, 16 nt, Homo sapiens
cauuguggucacagga

SEQ ID NO: 42566 - RNA, 20 nt, Homo sapiens
cauuguucuugugaacccaa

SEQ ID NO: 42567 - RNA, 15 nt, Homo sapiens
cauuuaaaauauuuu

SEQ ID NO: 42568 - RNA, 11 nt, Homo sapiens
cauuuaauuua

SEQ ID NO: 42569 - RNA, 22 nt, Homo sapiens
cauuuauaauguagcagcucau

SEQ ID NO: 42570 - RNA, 14 nt, Homo sapiens
cauuuccaaauuca

SEQ ID NO: 42571 - RNA, 17 nt, Homo sapiens
cauuuccaaauucacaa

SEQ ID NO: 42572 - RNA, 21 nt, Homo sapiens
cauuucuauuuauuuacugag

SEQ ID NO: 42573 - RNA, 17 nt, Homo sapiens
cauuugaaaauuuugau

SEQ ID NO: 42574 - RNA, 19 nt, Homo sapiens
cauuugcgaaugguuccau

SEQ ID NO: 42575 - RNA, 20 nt, Homo sapiens
cauuugcgaaugguuccauu

SEQ ID NO: 42576 - RNA, 19 nt, Homo sapiens
cauuugcuggagcucugcc

SEQ ID NO: 42577 - RNA, 11 nt, Homo sapiens
cauuugguaag

SEQ ID NO: 42578 - RNA, 14 nt, Homo sapiens
cauuuguauaaaau

SEQ ID NO: 42579 - RNA, 17 nt, Homo sapiens
cauuuguuaauauuucu

SEQ ID NO: 42580 - RNA, 19 nt, Homo sapiens
cauuuguuaauauuucuuc

SEQ ID NO: 42581 - RNA, 12 nt, Homo sapiens
cauuuguuugaa

SEQ ID NO: 42582 - RNA, 22 nt, Homo sapiens
cauuuuauaaaucgcuuuugau

SEQ ID NO: 42583 - RNA, 12 nt, Homo sapiens
cauuuucacuuu

SEQ ID NO: 42584 - RNA, 15 nt, Homo sapiens
cauuuuuuaaaugca

SEQ ID NO: 42585 - RNA, 18 nt, Homo sapiens
ccaaacuggagcuugaaa

SEQ ID NO: 42586 - RNA, 13 nt, Homo sapiens
ccaaagugcuggg

SEQ ID NO: 42587 - RNA, 21 nt, Homo sapiens
ccaaagugugacucauuaaau

SEQ ID NO: 42588 - RNA, 20 nt, Homo sapiens
ccaaauucacaaguuguguu

SEQ ID NO: 42589 - RNA, 16 nt, Homo sapiens
ccaaauuuguauuuaa

SEQ ID NO: 42590 - RNA, 14 nt, Homo sapiens
ccaacacgagcagg

SEQ ID NO: 42591 - RNA, 21 nt, Homo sapiens
ccaacagaagcuuccauucca

SEQ ID NO: 42592 - RNA, 16 nt, Homo sapiens
ccaacagcuccaccuu

SEQ ID NO: 42593 - RNA, 18 nt, Homo sapiens
ccaaccuaagcaagaucc

SEQ ID NO: 42594 - RNA, 21 nt, Homo sapiens
ccaacugggguggguggggca

SEQ ID NO: 42595 - RNA, 23 nt, Homo sapiens
ccaacugggguggguggggcagu

SEQ ID NO: 42596 - RNA, 20 nt, Homo sapiens
ccaacuuugaagucugauuu

SEQ ID NO: 42597 - RNA, 19 nt, Homo sapiens
ccaagaaaauggccaguga

SEQ ID NO: 42598 - RNA, 18 nt, Homo sapiens
ccaagaagauaaucucca

SEQ ID NO: 42599 - RNA, 20 nt, Homo sapiens
ccaagaagauaaucuccaaa

SEQ ID NO: 42600 - RNA, 21 nt, Homo sapiens
ccaagaagauaaucuccaaag

SEQ ID NO: 42601 - RNA, 11 nt, Homo sapiens
ccaagcaaaug

SEQ ID NO: 42602 - RNA, 13 nt, Homo sapiens
ccaagccugacca

SEQ ID NO: 42603 - RNA, 17 nt, Homo sapiens
ccaaggcccccgggccg

SEQ ID NO: 42604 - RNA, 19 nt, Homo sapiens
ccaaggcccccgggccgac

SEQ ID NO: 42605 - RNA, 21 nt, Homo sapiens
ccaaggcccccgggccgacgg

SEQ ID NO: 42606 - RNA, 14 nt, Homo sapiens
ccaaggcuggagug

SEQ ID NO: 42607 - RNA, 18 nt, Homo sapiens
ccaaggcuggagugcagu

SEQ ID NO: 42608 - RNA, 22 nt, Homo sapiens
ccaaggcuggagugcaguggcg

SEQ ID NO: 42609 - RNA, 21 nt, Homo sapiens
ccaaguucuuaguugcuguau

SEQ ID NO: 42610 - RNA, 16 nt, Homo sapiens
ccaaguuuauauacaa

SEQ ID NO: 42611 - RNA, 19 nt, Homo sapiens
ccaaguuuauauacaauua

SEQ ID NO: 42612 - RNA, 23 nt, Homo sapiens
ccaauacauuauuggacuuccau

SEQ ID NO: 42613 - RNA, 20 nt, Homo sapiens
ccaaugagaucauugugaag

SEQ ID NO: 42614 - RNA, 14 nt, Homo sapiens
ccaauuuacuuugu

SEQ ID NO: 42615 - RNA, 15 nt, Homo sapiens
ccaauuuacuuuguu

SEQ ID NO: 42616 - RNA, 20 nt, Homo sapiens
ccacaacuauauuaucaugc

SEQ ID NO: 42617 - RNA, 21 nt, Homo sapiens
ccacaccagggccuggcuggg

SEQ ID NO: 42618 - RNA, 12 nt, Homo sapiens
ccacagcaguug

SEQ ID NO: 42619 - RNA, 23 nt, Homo sapiens
ccacagcaguugaaaagacucca

SEQ ID NO: 42620 - RNA, 10 nt, Homo sapiens
ccacagcugu

SEQ ID NO: 42621 - RNA, 15 nt, Homo sapiens
ccacagcuguaugau

SEQ ID NO: 42622 - RNA, 22 nt, Homo sapiens
ccacagcuguaugauucccagc

SEQ ID NO: 42623 - RNA, 18 nt, Homo sapiens
ccacauccugugggaccu

SEQ ID NO: 42624 - RNA, 15 nt, Homo sapiens
ccacauggcuucacc

SEQ ID NO: 42625 - RNA, 17 nt, Homo sapiens
ccaccaaacccggccug

SEQ ID NO: 42626 - RNA, 19 nt, Homo sapiens
ccaccaaacccggccugau

SEQ ID NO: 42627 - RNA, 14 nt, Homo sapiens
ccaccacgcccagc

SEQ ID NO: 42628 - RNA, 20 nt, Homo sapiens
ccaccagucugacuguuucc

SEQ ID NO: 42629 - RNA, 15 nt, Homo sapiens
ccacccgcccaccgc

SEQ ID NO: 42630 - RNA, 14 nt, Homo sapiens
ccacccuugccaug

SEQ ID NO: 42631 - RNA, 23 nt, Homo sapiens
ccaccgcagggugaacugcagcg

SEQ ID NO: 42632 - RNA, 14 nt, Homo sapiens
ccacgcucuggguc

SEQ ID NO: 42633 - RNA, 17 nt, Homo sapiens
ccacgcucugggucgcc

SEQ ID NO: 42634 - RNA, 19 nt, Homo sapiens
ccacgcucugggucgccgg

SEQ ID NO: 42635 - RNA, 12 nt, Homo sapiens
ccacggcuggag

SEQ ID NO: 42636 - RNA, 12 nt, Homo sapiens
ccacuacugcua

SEQ ID NO: 42637 - RNA, 11 nt, Homo sapiens
ccacucauuca

SEQ ID NO: 42638 - RNA, 16 nt, Homo sapiens
ccacuuauaggaauug

SEQ ID NO: 42639 - RNA, 21 nt, Homo sapiens
ccacuuauaggaauugaccca

SEQ ID NO: 42640 - RNA, 21 nt, Homo sapiens
ccacuuccucccggccgcgcu

SEQ ID NO: 42641 - RNA, 22 nt, Homo sapiens
ccacuuccucccggccgcgcug

SEQ ID NO: 42642 - RNA, 16 nt, Homo sapiens
ccacuuggacaugggc

SEQ ID NO: 42643 - RNA, 22 nt, Homo sapiens
ccacuuuccaauaaagaguucc

SEQ ID NO: 42644 - RNA, 14 nt, Homo sapiens
ccagaaugaccugg

SEQ ID NO: 42645 - RNA, 11 nt, Homo sapiens
ccagagaccag

SEQ ID NO: 42646 - RNA, 13 nt, Homo sapiens
ccagagcuacagg

SEQ ID NO: 42647 - RNA, 14 nt, Homo sapiens
ccagagcuacaggc

SEQ ID NO: 42648 - RNA, 17 nt, Homo sapiens
ccagagcuacaggcccc

SEQ ID NO: 42649 - RNA, 16 nt, Homo sapiens
ccagaucaagccugcc

SEQ ID NO: 42650 - RNA, 19 nt, Homo sapiens
ccagcacggggcuaagcau

SEQ ID NO: 42651 - RNA, 23 nt, Homo sapiens
ccagcacuuugggaggcugaggc

SEQ ID NO: 42652 - RNA, 17 nt, Homo sapiens
ccagcccuacaccauuc

SEQ ID NO: 42653 - RNA, 19 nt, Homo sapiens
ccagccugagcgacaguga

SEQ ID NO: 42654 - RNA, 16 nt, Homo sapiens
ccagccuugcuccugg

SEQ ID NO: 42655 - RNA, 18 nt, Homo sapiens
ccagcuacuugggaggcu

SEQ ID NO: 42656 - RNA, 19 nt, Homo sapiens
ccagcuacuugggaggcug

SEQ ID NO: 42657 - RNA, 23 nt, Homo sapiens
ccagcuacuugggaggcugaggc

SEQ ID NO: 42658 - RNA, 15 nt, Homo sapiens
ccagcucuaucccaa

SEQ ID NO: 42659 - RNA, 17 nt, Homo sapiens
ccagcugccccggggag

SEQ ID NO: 42660 - RNA, 16 nt, Homo sapiens
ccaggaaaaucugcac

SEQ ID NO: 42661 - RNA, 16 nt, Homo sapiens
ccaggaguuuggccag

SEQ ID NO: 42662 - RNA, 18 nt, Homo sapiens
ccaggaguuuggccagaa

SEQ ID NO: 42663 - RNA, 19 nt, Homo sapiens
ccaggaguuuggccagaag

SEQ ID NO: 42664 - RNA, 18 nt, Homo sapiens
ccaggauuuaaguuucac

SEQ ID NO: 42665 - RNA, 17 nt, Homo sapiens
ccaggcacccccagaau

SEQ ID NO: 42666 - RNA, 20 nt, Homo sapiens
ccaggcacccccagaaugac

SEQ ID NO: 42667 - RNA, 11 nt, Homo sapiens
ccaggcggcug

SEQ ID NO: 42668 - RNA, 13 nt, Homo sapiens
ccaggcggguccg

SEQ ID NO: 42669 - RNA, 15 nt, Homo sapiens
ccaggcggguccggg

SEQ ID NO: 42670 - RNA, 19 nt, Homo sapiens
ccaggcggguccgggucgc

SEQ ID NO: 42671 - RNA, 22 nt, Homo sapiens
ccaggcggguccgggucgcagg

SEQ ID NO: 42672 - RNA, 12 nt, Homo sapiens
ccaggcuggucu

SEQ ID NO: 42673 - RNA, 20 nt, Homo sapiens
ccagggacugaggggagggg

SEQ ID NO: 42674 - RNA, 13 nt, Homo sapiens
ccagggcuacgcg

SEQ ID NO: 42675 - RNA, 14 nt, Homo sapiens
ccagggcuacgcgc

SEQ ID NO: 42676 - RNA, 15 nt, Homo sapiens
ccagggcuacgcgcg

SEQ ID NO: 42677 - RNA, 17 nt, Homo sapiens
ccagggcuacgcgcgcu

SEQ ID NO: 42678 - RNA, 18 nt, Homo sapiens
ccagggcuacgcgcgcuc

SEQ ID NO: 42679 - RNA, 19 nt, Homo sapiens
ccagggcuacgcgcgcucc

SEQ ID NO: 42680 - RNA, 20 nt, Homo sapiens
ccagggcuacgcgcgcuccg

SEQ ID NO: 42681 - RNA, 23 nt, Homo sapiens
ccagggcuacgcgcgcuccgcgc

SEQ ID NO: 42682 - RNA, 18 nt, Homo sapiens
ccagggcuugugugcaca

SEQ ID NO: 42683 - RNA, 20 nt, Homo sapiens
ccagggcuugugugcacaua

SEQ ID NO: 42684 - RNA, 20 nt, Homo sapiens
ccagguagagagaccacaag

SEQ ID NO: 42685 - RNA, 17 nt, Homo sapiens
ccagguagagggugugu

SEQ ID NO: 42686 - RNA, 20 nt, Homo sapiens
ccaguaaaugggggugcauu

SEQ ID NO: 42687 - RNA, 17 nt, Homo sapiens
ccagucauuauguuaau

SEQ ID NO: 42688 - RNA, 13 nt, Homo sapiens
ccagugagacagc

SEQ ID NO: 42689 - RNA, 18 nt, Homo sapiens
ccagugagaucaauguga

SEQ ID NO: 42690 - RNA, 22 nt, Homo sapiens
ccaucaaggguacacugccuuc

SEQ ID NO: 42691 - RNA, 12 nt, Homo sapiens
ccaucccggccg

SEQ ID NO: 42692 - RNA, 13 nt, Homo sapiens
ccaucccggccgg

SEQ ID NO: 42693 - RNA, 14 nt, Homo sapiens
ccaucccggccggc

SEQ ID NO: 42694 - RNA, 15 nt, Homo sapiens
ccaucccggccggcg

SEQ ID NO: 42695 - RNA, 21 nt, Homo sapiens
ccaucccggccggcgcgcuca

SEQ ID NO: 42696 - RNA, 22 nt, Homo sapiens
ccaucccggccggcgcgcucau

SEQ ID NO: 42697 - RNA, 22 nt, Homo sapiens
ccaucuuucaagggaccucucc

SEQ ID NO: 42698 - RNA, 15 nt, Homo sapiens
ccaugagaguucugu

SEQ ID NO: 42699 - RNA, 22 nt, Homo sapiens
ccaugaucccaccucccauuca

SEQ ID NO: 42700 - RNA, 20 nt, Homo sapiens
ccaugauguuuagaaacaca

SEQ ID NO: 42701 - RNA, 12 nt, Homo sapiens
ccaugcuggcca

SEQ ID NO: 42702 - RNA, 16 nt, Homo sapiens
ccaugcuggccaggcu

SEQ ID NO: 42703 - RNA, 15 nt, Homo sapiens
ccauggagguuaagc

SEQ ID NO: 42704 - RNA, 16 nt, Homo sapiens
ccaugggcacuguggg

SEQ ID NO: 42705 - RNA, 21 nt, Homo sapiens
ccauggggguaauaagagcag

SEQ ID NO: 42706 - RNA, 19 nt, Homo sapiens
ccauuauauuuauuguuua

SEQ ID NO: 42707 - RNA, 16 nt, Homo sapiens
ccauucaggaugccca

SEQ ID NO: 42708 - RNA, 17 nt, Homo sapiens
ccauucaggaugcccac

SEQ ID NO: 42709 - RNA, 21 nt, Homo sapiens
ccauucaggaugcccacggcu

SEQ ID NO: 42710 - RNA, 12 nt, Homo sapiens
ccauuccaagcc

SEQ ID NO: 42711 - RNA, 15 nt, Homo sapiens
ccauuccaagccuga

SEQ ID NO: 42712 - RNA, 18 nt, Homo sapiens
ccauuccaagccugacca

SEQ ID NO: 42713 - RNA, 16 nt, Homo sapiens
ccauugugggcucugg

SEQ ID NO: 42714 - RNA, 14 nt, Homo sapiens
ccauuguggucaca

SEQ ID NO: 42715 - RNA, 16 nt, Homo sapiens
ccauuuuugaaaccaa

SEQ ID NO: 42716 - RNA, 17 nt, Homo sapiens
ccauuuuugaaaccaaa

SEQ ID NO: 42717 - RNA, 22 nt, Homo sapiens
cccaaaacugauacccuuugaa

SEQ ID NO: 42718 - RNA, 22 nt, Homo sapiens
cccaacuauaaaacuaggugcu

SEQ ID NO: 42719 - RNA, 14 nt, Homo sapiens
cccaagaaugagaa

SEQ ID NO: 42720 - RNA, 16 nt, Homo sapiens
cccacaagaaaugaaa

SEQ ID NO: 42721 - RNA, 20 nt, Homo sapiens
cccacaccagggccuggcug

SEQ ID NO: 42722 - RNA, 24 nt, Homo sapiens
cccacaccagggccuggcugggag

SEQ ID NO: 42723 - RNA, 14 nt, Homo sapiens
cccacccgcccacc

SEQ ID NO: 42724 - RNA, 13 nt, Homo sapiens
cccacggcuggag

SEQ ID NO: 42725 - RNA, 14 nt, Homo sapiens
cccacggcuggagc

SEQ ID NO: 42726 - RNA, 16 nt, Homo sapiens
cccacuuccucccggc

SEQ ID NO: 42727 - RNA, 17 nt, Homo sapiens
cccacuuccucccggcc

SEQ ID NO: 42728 - RNA, 18 nt, Homo sapiens
cccacuuccucccggccg

SEQ ID NO: 42729 - RNA, 19 nt, Homo sapiens
cccacuuccucccggccgc

SEQ ID NO: 42730 - RNA, 21 nt, Homo sapiens
cccacuuccucccggccgcgc

SEQ ID NO: 42731 - RNA, 11 nt, Homo sapiens
cccagauacca

SEQ ID NO: 42732 - RNA, 12 nt, Homo sapiens
cccagauaccau

SEQ ID NO: 42733 - RNA, 13 nt, Homo sapiens
cccagauaccaug

SEQ ID NO: 42734 - RNA, 22 nt, Homo sapiens
cccagcacuuugggaggcugag

SEQ ID NO: 42735 - RNA, 15 nt, Homo sapiens
cccagccccuugaga

SEQ ID NO: 42736 - RNA, 20 nt, Homo sapiens
cccagccccuugagaaaccu

SEQ ID NO: 42737 - RNA, 23 nt, Homo sapiens
cccagcgagggacaccgaguggc

SEQ ID NO: 42738 - RNA, 15 nt, Homo sapiens
cccagcuacuuggga

SEQ ID NO: 42739 - RNA, 22 nt, Homo sapiens
cccagcuacuugggaggcugag

SEQ ID NO: 42740 - RNA, 21 nt, Homo sapiens
cccagcuagaauucacuccac

SEQ ID NO: 42741 - RNA, 14 nt, Homo sapiens
cccaggaguuuggc

SEQ ID NO: 42742 - RNA, 16 nt, Homo sapiens
cccaggaguuuggcca

SEQ ID NO: 42743 - RNA, 13 nt, Homo sapiens
cccaggcgggucc

SEQ ID NO: 42744 - RNA, 19 nt, Homo sapiens
cccaggcggguccgggucg

SEQ ID NO: 42745 - RNA, 20 nt, Homo sapiens
cccaggcggguccgggucgc

SEQ ID NO: 42746 - RNA, 22 nt, Homo sapiens
cccauccugccccugagcccau

SEQ ID NO: 42747 - RNA, 18 nt, Homo sapiens
ccccagagcuacaggccc

SEQ ID NO: 42748 - RNA, 19 nt, Homo sapiens
ccccagagcuacaggcccc

SEQ ID NO: 42749 - RNA, 20 nt, Homo sapiens
ccccagagcuacaggcccca

SEQ ID NO: 42750 - RNA, 20 nt, Homo sapiens
ccccagauaccaugaugcug

SEQ ID NO: 42751 - RNA, 23 nt, Homo sapiens
ccccaggcggguccgggucgcag

SEQ ID NO: 42752 - RNA, 14 nt, Homo sapiens
ccccaucugguccu

SEQ ID NO: 42753 - RNA, 13 nt, Homo sapiens
cccccgggccgac

SEQ ID NO: 42754 - RNA, 21 nt, Homo sapiens
cccccgggccgacggagccgg

SEQ ID NO: 42755 - RNA, 14 nt, Homo sapiens
ccccgggaguggcg

SEQ ID NO: 42756 - RNA, 16 nt, Homo sapiens
ccccgggaguggcgcg

SEQ ID NO: 42757 - RNA, 20 nt, Homo sapiens
ccccgggaguggcgcgcgcc

SEQ ID NO: 42758 - RNA, 14 nt, Homo sapiens
ccccgggccgacgg

SEQ ID NO: 42759 - RNA, 17 nt, Homo sapiens
ccccgggccgacggagc

SEQ ID NO: 42760 - RNA, 18 nt, Homo sapiens
ccccgggccgacggagcc

SEQ ID NO: 42761 - RNA, 18 nt, Homo sapiens
ccccggggaggggcgcuc

SEQ ID NO: 42762 - RNA, 19 nt, Homo sapiens
ccccugcacuccagccuga

SEQ ID NO: 42763 - RNA, 20 nt, Homo sapiens
ccccugcacuccagccugag

SEQ ID NO: 42764 - RNA, 17 nt, Homo sapiens
cccgaaacuaccagccc

SEQ ID NO: 42765 - RNA, 13 nt, Homo sapiens
cccgcccaccgca

SEQ ID NO: 42766 - RNA, 18 nt, Homo sapiens
cccgcuguuccucgccac

SEQ ID NO: 42767 - RNA, 20 nt, Homo sapiens
cccgcuguuccucgccacgc

SEQ ID NO: 42768 - RNA, 11 nt, Homo sapiens
cccggccgcgc

SEQ ID NO: 42769 - RNA, 12 nt, Homo sapiens
cccggccgcgcu

SEQ ID NO: 42770 - RNA, 16 nt, Homo sapiens
cccggccgcgcugcgc

SEQ ID NO: 42771 - RNA, 17 nt, Homo sapiens
cccggccgcgcugcgcg

SEQ ID NO: 42772 - RNA, 18 nt, Homo sapiens
cccggccgcgcugcgcgc

SEQ ID NO: 42773 - RNA, 20 nt, Homo sapiens
cccggccgcgcugcgcgccg

SEQ ID NO: 42774 - RNA, 22 nt, Homo sapiens
cccggccgcgcugcgcgccgcg

SEQ ID NO: 42775 - RNA, 24 nt, Homo sapiens
cccggccgcgcugcgcgccgcgcu

SEQ ID NO: 42776 - RNA, 11 nt, Homo sapiens
cccggccggcg

SEQ ID NO: 42777 - RNA, 12 nt, Homo sapiens
cccggccggcgc

SEQ ID NO: 42778 - RNA, 13 nt, Homo sapiens
cccggccggcgcg

SEQ ID NO: 42779 - RNA, 15 nt, Homo sapiens
cccggccggcgcgcu

SEQ ID NO: 42780 - RNA, 14 nt, Homo sapiens
cccgggaguggcgc

SEQ ID NO: 42781 - RNA, 15 nt, Homo sapiens
cccgggaguggcgcg

SEQ ID NO: 42782 - RNA, 22 nt, Homo sapiens
cccgggaguggcgcgcgccacc

SEQ ID NO: 42783 - RNA, 12 nt, Homo sapiens
cccgggccgacg

SEQ ID NO: 42784 - RNA, 18 nt, Homo sapiens
cccgggccgacggagccg

SEQ ID NO: 42785 - RNA, 19 nt, Homo sapiens
cccgggccgacggagccgg

SEQ ID NO: 42786 - RNA, 20 nt, Homo sapiens
cccgggccgacggagccggg

SEQ ID NO: 42787 - RNA, 13 nt, Homo sapiens
cccggggaggggc

SEQ ID NO: 42788 - RNA, 14 nt, Homo sapiens
cccggggaggggcg

SEQ ID NO: 42789 - RNA, 15 nt, Homo sapiens
cccggggaggggcgc

SEQ ID NO: 42790 - RNA, 17 nt, Homo sapiens
cccggggaggggcgcuc

SEQ ID NO: 42791 - RNA, 18 nt, Homo sapiens
cccggggaggggcgcucg

SEQ ID NO: 42792 - RNA, 13 nt, Homo sapiens
cccgugugccuga

SEQ ID NO: 42793 - RNA, 15 nt, Homo sapiens
cccgugugccugagc

SEQ ID NO: 42794 - RNA, 11 nt, Homo sapiens
cccuacaccau

SEQ ID NO: 42795 - RNA, 12 nt, Homo sapiens
cccuacaccauu

SEQ ID NO: 42796 - RNA, 16 nt, Homo sapiens
cccuagcccuuacguc

SEQ ID NO: 42797 - RNA, 12 nt, Homo sapiens
cccucaugcugc

SEQ ID NO: 42798 - RNA, 13 nt, Homo sapiens
cccucaugcugcc

SEQ ID NO: 42799 - RNA, 15 nt, Homo sapiens
cccucaugcugccaa

SEQ ID NO: 42800 - RNA, 16 nt, Homo sapiens
cccucaugcugccaau

SEQ ID NO: 42801 - RNA, 13 nt, Homo sapiens
cccucuggcugcu

SEQ ID NO: 42802 - RNA, 11 nt, Homo sapiens
cccucuggguc

SEQ ID NO: 42803 - RNA, 12 nt, Homo sapiens
cccucugggucu

SEQ ID NO: 42804 - RNA, 20 nt, Homo sapiens
cccucugggucucagugucc

SEQ ID NO: 42805 - RNA, 18 nt, Homo sapiens
cccucuguugccaaggcu

SEQ ID NO: 42806 - RNA, 20 nt, Homo sapiens
cccucuguugccaaggcugg

SEQ ID NO: 42807 - RNA, 24 nt, Homo sapiens
cccucuguugccaaggcuggagug

SEQ ID NO: 42808 - RNA, 18 nt, Homo sapiens
cccugaaagucccagauc

SEQ ID NO: 42809 - RNA, 15 nt, Homo sapiens
cccugcacuccagcc

SEQ ID NO: 42810 - RNA, 12 nt, Homo sapiens
cccugccaccuc

SEQ ID NO: 42811 - RNA, 21 nt, Homo sapiens
cccugccaugcucuccaaacc

SEQ ID NO: 42812 - RNA, 15 nt, Homo sapiens
cccugugcggccugg

SEQ ID NO: 42813 - RNA, 17 nt, Homo sapiens
cccuuacaggaacagaa

SEQ ID NO: 42814 - RNA, 23 nt, Homo sapiens
cccuuacaggaacagaagaggaa

SEQ ID NO: 42815 - RNA, 18 nt, Homo sapiens
cccuucccacacugucca

SEQ ID NO: 42816 - RNA, 19 nt, Homo sapiens
cccuucuuacaaugcauuc

SEQ ID NO: 42817 - RNA, 18 nt, Homo sapiens
cccuuuuacauacugcug

SEQ ID NO: 42818 - RNA, 14 nt, Homo sapiens
ccgaagucuuccau

SEQ ID NO: 42819 - RNA, 12 nt, Homo sapiens
ccgacggagccg

SEQ ID NO: 42820 - RNA, 15 nt, Homo sapiens
ccgacggagccggga

SEQ ID NO: 42821 - RNA, 17 nt, Homo sapiens
ccgacggagccgggaaa

SEQ ID NO: 42822 - RNA, 19 nt, Homo sapiens
ccgacggagccgggaaaga

SEQ ID NO: 42823 - RNA, 22 nt, Homo sapiens
ccgcaaugugacuuaaugccac

SEQ ID NO: 42824 - RNA, 19 nt, Homo sapiens
ccgcagggugaacugcagc

SEQ ID NO: 42825 - RNA, 16 nt, Homo sapiens
ccgcauccuagucucu

SEQ ID NO: 42826 - RNA, 20 nt, Homo sapiens
ccgcauccuagucucuauca

SEQ ID NO: 42827 - RNA, 11 nt, Homo sapiens
ccgcccaccgc

SEQ ID NO: 42828 - RNA, 15 nt, Homo sapiens
ccgcccaccgcaggg

SEQ ID NO: 42829 - RNA, 18 nt, Homo sapiens
ccgcccaccgcaggguga

SEQ ID NO: 42830 - RNA, 16 nt, Homo sapiens
ccgcccaucuccgucu

SEQ ID NO: 42831 - RNA, 15 nt, Homo sapiens
ccgcgcagcucaggc

SEQ ID NO: 42832 - RNA, 17 nt, Homo sapiens
ccgcgcagcucaggcug

SEQ ID NO: 42833 - RNA, 19 nt, Homo sapiens
ccgcgcagcucaggcuggc

SEQ ID NO: 42834 - RNA, 20 nt, Homo sapiens
ccgcgcagcucaggcuggca

SEQ ID NO: 42835 - RNA, 21 nt, Homo sapiens
ccgcgcagcucaggcuggcac

SEQ ID NO: 42836 - RNA, 22 nt, Homo sapiens
ccgcgcagcucaggcuggcacc

SEQ ID NO: 42837 - RNA, 11 nt, Homo sapiens
ccgcgcugcgc

SEQ ID NO: 42838 - RNA, 12 nt, Homo sapiens
ccgcgcugcgcg

SEQ ID NO: 42839 - RNA, 13 nt, Homo sapiens
ccgcgcugcgcgc

SEQ ID NO: 42840 - RNA, 17 nt, Homo sapiens
ccgcgcugcgcgccgcg

SEQ ID NO: 42841 - RNA, 18 nt, Homo sapiens
ccgcgcugcgcgccgcgc

SEQ ID NO: 42842 - RNA, 19 nt, Homo sapiens
ccgcgcugcgcgccgcgcu

SEQ ID NO: 42843 - RNA, 20 nt, Homo sapiens
ccgcgcugcgcgccgcgcuc

SEQ ID NO: 42844 - RNA, 22 nt, Homo sapiens
ccgcgcugcgcgccgcgcuccu

SEQ ID NO: 42845 - RNA, 14 nt, Homo sapiens
ccgcuacuuccagg

SEQ ID NO: 42846 - RNA, 15 nt, Homo sapiens
ccgcuguacgcgagc

SEQ ID NO: 42847 - RNA, 16 nt, Homo sapiens
ccgcuguacgcgagcg

SEQ ID NO: 42848 - RNA, 17 nt, Homo sapiens
ccgcuguacgcgagcgc

SEQ ID NO: 42849 - RNA, 18 nt, Homo sapiens
ccgcuguacgcgagcgcg

SEQ ID NO: 42850 - RNA, 19 nt, Homo sapiens
ccgcuguacgcgagcgcgc

SEQ ID NO: 42851 - RNA, 21 nt, Homo sapiens
ccgcuguacgcgagcgcgcgc

SEQ ID NO: 42852 - RNA, 22 nt, Homo sapiens
ccgcuguacgcgagcgcgcgcg

SEQ ID NO: 42853 - RNA, 23 nt, Homo sapiens
ccgcuguacgcgagcgcgcgcgc

SEQ ID NO: 42854 - RNA, 24 nt, Homo sapiens
ccgcuguacgcgagcgcgcgcgcc

SEQ ID NO: 42855 - RNA, 15 nt, Homo sapiens
ccgcuguuccucgcc

SEQ ID NO: 42856 - RNA, 18 nt, Homo sapiens
ccgcuguuccucgccacg

SEQ ID NO: 42857 - RNA, 21 nt, Homo sapiens
ccgcuguuccucgccacgcuc

SEQ ID NO: 42858 - RNA, 23 nt, Homo sapiens
ccgcuguuccucgccacgcucug

SEQ ID NO: 42859 - RNA, 22 nt, Homo sapiens
ccggacgcugcugccgugggcc

SEQ ID NO: 42860 - RNA, 22 nt, Homo sapiens
ccggagccccuugggcagguca

SEQ ID NO: 42861 - RNA, 14 nt, Homo sapiens
ccggagccuccagc

SEQ ID NO: 42862 - RNA, 17 nt, Homo sapiens
ccggagccuccagcugc

SEQ ID NO: 42863 - RNA, 18 nt, Homo sapiens
ccggagccuccagcugcc

SEQ ID NO: 42864 - RNA, 21 nt, Homo sapiens
ccggagccuccagcugccccg

SEQ ID NO: 42865 - RNA, 11 nt, Homo sapiens
ccggccgcgcu

SEQ ID NO: 42866 - RNA, 12 nt, Homo sapiens
ccggccgcgcug

SEQ ID NO: 42867 - RNA, 13 nt, Homo sapiens
ccggccgcgcugc

SEQ ID NO: 42868 - RNA, 15 nt, Homo sapiens
ccggccgcgcugcgc

SEQ ID NO: 42869 - RNA, 19 nt, Homo sapiens
ccggccgcgcugcgcgccg

SEQ ID NO: 42870 - RNA, 20 nt, Homo sapiens
ccggccgcgcugcgcgccgc

SEQ ID NO: 42871 - RNA, 21 nt, Homo sapiens
ccggccgcgcugcgcgccgcg

SEQ ID NO: 42872 - RNA, 22 nt, Homo sapiens
ccggccgcgcugcgcgccgcgc

SEQ ID NO: 42873 - RNA, 23 nt, Homo sapiens
ccggccgcgcugcgcgccgcgcu

SEQ ID NO: 42874 - RNA, 16 nt, Homo sapiens
ccggccggcgcgcuca

SEQ ID NO: 42875 - RNA, 12 nt, Homo sapiens
ccggcgcgcuca

SEQ ID NO: 42876 - RNA, 17 nt, Homo sapiens
ccggcgcgcucauccca

SEQ ID NO: 42877 - RNA, 18 nt, Homo sapiens
ccggcgcgcucaucccac

SEQ ID NO: 42878 - RNA, 19 nt, Homo sapiens
ccggcgcgcucaucccacc

SEQ ID NO: 42879 - RNA, 22 nt, Homo sapiens
ccggcgcgcucaucccacccgc

SEQ ID NO: 42880 - RNA, 17 nt, Homo sapiens
ccgggaaagaagagccg

SEQ ID NO: 42881 - RNA, 18 nt, Homo sapiens
ccgggaaagaagagccgg

SEQ ID NO: 42882 - RNA, 19 nt, Homo sapiens
ccgggaaagaagagccgga

SEQ ID NO: 42883 - RNA, 20 nt, Homo sapiens
ccgggaaagaagagccggag

SEQ ID NO: 42884 - RNA, 21 nt, Homo sapiens
ccgggaaagaagagccggagc

SEQ ID NO: 42885 - RNA, 23 nt, Homo sapiens
ccgggaaagaagagccggagccu

SEQ ID NO: 42886 - RNA, 14 nt, Homo sapiens
ccgggaguggcgcg

SEQ ID NO: 42887 - RNA, 18 nt, Homo sapiens
ccgggaguggcgcgcgcc

SEQ ID NO: 42888 - RNA, 19 nt, Homo sapiens
ccgggcaugguggcgcgca

SEQ ID NO: 42889 - RNA, 11 nt, Homo sapiens
ccgggccgacg

SEQ ID NO: 42890 - RNA, 12 nt, Homo sapiens
ccgggccgacgg

SEQ ID NO: 42891 - RNA, 13 nt, Homo sapiens
ccgggccgacgga

SEQ ID NO: 42892 - RNA, 16 nt, Homo sapiens
ccgggccgacggagcc

SEQ ID NO: 42893 - RNA, 19 nt, Homo sapiens
ccgggccgacggagccggg

SEQ ID NO: 42894 - RNA, 20 nt, Homo sapiens
ccgggccgacggagccggga

SEQ ID NO: 42895 - RNA, 21 nt, Homo sapiens
ccgggccgacggagccgggaa

SEQ ID NO: 42896 - RNA, 11 nt, Homo sapiens
ccgggcgcggu

SEQ ID NO: 42897 - RNA, 18 nt, Homo sapiens
ccgggcgcgguggcucac

SEQ ID NO: 42898 - RNA, 16 nt, Homo sapiens
ccgggcguggugguga

SEQ ID NO: 42899 - RNA, 12 nt, Homo sapiens
ccggggaggggc

SEQ ID NO: 42900 - RNA, 14 nt, Homo sapiens
ccggggaggggcgc

SEQ ID NO: 42901 - RNA, 17 nt, Homo sapiens
ccggggaggggcgcucg

SEQ ID NO: 42902 - RNA, 18 nt, Homo sapiens
ccggggaggggcgcucgc

SEQ ID NO: 42903 - RNA, 23 nt, Homo sapiens
ccggggaggggcgcucgcuuccg

SEQ ID NO: 42904 - RNA, 14 nt, Homo sapiens
ccgggucgcaggac

SEQ ID NO: 42905 - RNA, 15 nt, Homo sapiens
ccgggucgcaggacc

SEQ ID NO: 42906 - RNA, 22 nt, Homo sapiens
ccgggucgcaggaccaucccgg

SEQ ID NO: 42907 - RNA, 15 nt, Homo sapiens
ccgguccuugcugca

SEQ ID NO: 42908 - RNA, 23 nt, Homo sapiens
ccgguccuugcugcaccugugcc

SEQ ID NO: 42909 - RNA, 19 nt, Homo sapiens
ccgucucccaaagugcugg

SEQ ID NO: 42910 - RNA, 12 nt, Homo sapiens
ccgugggccuga

SEQ ID NO: 42911 - RNA, 13 nt, Homo sapiens
ccgugggccugag

SEQ ID NO: 42912 - RNA, 13 nt, Homo sapiens
ccgugugccugag

SEQ ID NO: 42913 - RNA, 22 nt, Homo sapiens
ccguuuugugaagaaacauuua

SEQ ID NO: 42914 - RNA, 14 nt, Homo sapiens
ccuaaccagccugg

SEQ ID NO: 42915 - RNA, 14 nt, Homo sapiens
ccuaagucccugcu

SEQ ID NO: 42916 - RNA, 15 nt, Homo sapiens
ccuaagucccugcug

SEQ ID NO: 42917 - RNA, 18 nt, Homo sapiens
ccuaagucccugcugccc

SEQ ID NO: 42918 - RNA, 19 nt, Homo sapiens
ccuaagucccugcugcccu

SEQ ID NO: 42919 - RNA, 14 nt, Homo sapiens
ccuaagugcagccc

SEQ ID NO: 42920 - RNA, 16 nt, Homo sapiens
ccuaaguuucaguuga

SEQ ID NO: 42921 - RNA, 17 nt, Homo sapiens
ccuaauaaaaaggugac

SEQ ID NO: 42922 - RNA, 18 nt, Homo sapiens
ccuaauaaaaaggugacc

SEQ ID NO: 42923 - RNA, 19 nt, Homo sapiens
ccuaauaaaaaggugacca

SEQ ID NO: 42924 - RNA, 20 nt, Homo sapiens
ccuaauaaaaaggugaccau

SEQ ID NO: 42925 - RNA, 21 nt, Homo sapiens
ccuacauguauuuguuugcau

SEQ ID NO: 42926 - RNA, 14 nt, Homo sapiens
ccuacugugucuca

SEQ ID NO: 42927 - RNA, 17 nt, Homo sapiens
ccuagcacacacuuuug

SEQ ID NO: 42928 - RNA, 13 nt, Homo sapiens
ccuagcgcagcca

SEQ ID NO: 42929 - RNA, 11 nt, Homo sapiens
ccuagggugau

SEQ ID NO: 42930 - RNA, 11 nt, Homo sapiens
ccuauaauuuu

SEQ ID NO: 42931 - RNA, 15 nt, Homo sapiens
ccuauauccugugac

SEQ ID NO: 42932 - RNA, 11 nt, Homo sapiens
ccucaagccag

SEQ ID NO: 42933 - RNA, 14 nt, Homo sapiens
ccucaagccagccu

SEQ ID NO: 42934 - RNA, 15 nt, Homo sapiens
ccucaagccagccuu

SEQ ID NO: 42935 - RNA, 14 nt, Homo sapiens
ccucaccccuugcc

SEQ ID NO: 42936 - RNA, 12 nt, Homo sapiens
ccucaccucuca

SEQ ID NO: 42937 - RNA, 16 nt, Homo sapiens
ccucaccucucaccuc

SEQ ID NO: 42938 - RNA, 22 nt, Homo sapiens
ccucagaaaacaaggaugaauu

SEQ ID NO: 42939 - RNA, 19 nt, Homo sapiens
ccucagggugcacacagga

SEQ ID NO: 42940 - RNA, 20 nt, Homo sapiens
ccucaucuguaaaauggaga

SEQ ID NO: 42941 - RNA, 22 nt, Homo sapiens
ccucaucuguaaaauggagaca

SEQ ID NO: 42942 - RNA, 15 nt, Homo sapiens
ccucaugcugccaau

SEQ ID NO: 42943 - RNA, 19 nt, Homo sapiens
ccucauggaauuggagcuc

SEQ ID NO: 42944 - RNA, 20 nt, Homo sapiens
ccucauggaauuggagcucg

SEQ ID NO: 42945 - RNA, 22 nt, Homo sapiens
ccucauggaauuggagcucgug

SEQ ID NO: 42946 - RNA, 20 nt, Homo sapiens
ccucauuccccaaccacuuc

SEQ ID NO: 42947 - RNA, 20 nt, Homo sapiens
ccuccaccuucuggguucaa

SEQ ID NO: 42948 - RNA, 12 nt, Homo sapiens
ccuccagcugcc

SEQ ID NO: 42949 - RNA, 16 nt, Homo sapiens
ccuccagcugccccgg

SEQ ID NO: 42950 - RNA, 19 nt, Homo sapiens
ccucccauucaggaugccc

SEQ ID NO: 42951 - RNA, 22 nt, Homo sapiens
ccucccauucaggaugcccacg

SEQ ID NO: 42952 - RNA, 11 nt, Homo sapiens
ccucccggccg

SEQ ID NO: 42953 - RNA, 12 nt, Homo sapiens
ccucccggccgc

SEQ ID NO: 42954 - RNA, 14 nt, Homo sapiens
ccucccggccgcgc

SEQ ID NO: 42955 - RNA, 22 nt, Homo sapiens
ccucccggccgcgcugcgcgcc

SEQ ID NO: 42956 - RNA, 23 nt, Homo sapiens
ccucccggccgcgcugcgcgccg

SEQ ID NO: 42957 - RNA, 15 nt, Homo sapiens
ccuccgcuacuucca

SEQ ID NO: 42958 - RNA, 22 nt, Homo sapiens
ccuccuccuucauggcaggcau

SEQ ID NO: 42959 - RNA, 21 nt, Homo sapiens
ccuccugccuaagugcagccc

SEQ ID NO: 42960 - RNA, 14 nt, Homo sapiens
ccuccugcuuccuc

SEQ ID NO: 42961 - RNA, 15 nt, Homo sapiens
ccucgccacgcucug

SEQ ID NO: 42962 - RNA, 23 nt, Homo sapiens
ccucgccacgcucugggucgccg

SEQ ID NO: 42963 - RNA, 15 nt, Homo sapiens
ccucggacggcuccg

SEQ ID NO: 42964 - RNA, 17 nt, Homo sapiens
ccucggacggcuccgga

SEQ ID NO: 42965 - RNA, 19 nt, Homo sapiens
ccucggacggcuccggacg

SEQ ID NO: 42966 - RNA, 17 nt, Homo sapiens
ccucuaaauucuuucau

SEQ ID NO: 42967 - RNA, 14 nt, Homo sapiens
ccucucaaccaccu

SEQ ID NO: 42968 - RNA, 14 nt, Homo sapiens
ccucucucauccac

SEQ ID NO: 42969 - RNA, 16 nt, Homo sapiens
ccucucuuauagaaua

SEQ ID NO: 42970 - RNA, 13 nt, Homo sapiens
ccucuggcugcug

SEQ ID NO: 42971 - RNA, 14 nt, Homo sapiens
ccucuggcugcugg

SEQ ID NO: 42972 - RNA, 17 nt, Homo sapiens
ccucuggcugcuggugg

SEQ ID NO: 42973 - RNA, 13 nt, Homo sapiens
ccucuguugccaa

SEQ ID NO: 42974 - RNA, 17 nt, Homo sapiens
ccucuguugccaaggcu

SEQ ID NO: 42975 - RNA, 18 nt, Homo sapiens
ccucuguugccaaggcug

SEQ ID NO: 42976 - RNA, 12 nt, Homo sapiens
ccucuuucaaag

SEQ ID NO: 42977 - RNA, 13 nt, Homo sapiens
ccucuuucaaagg

SEQ ID NO: 42978 - RNA, 23 nt, Homo sapiens
ccugaaagucccagaucaagccu

SEQ ID NO: 42979 - RNA, 21 nt, Homo sapiens
ccugacagcccaagggugggu

SEQ ID NO: 42980 - RNA, 15 nt, Homo sapiens
ccugagacacauggg

SEQ ID NO: 42981 - RNA, 20 nt, Homo sapiens
ccugagacacaugggugcua

SEQ ID NO: 42982 - RNA, 23 nt, Homo sapiens
ccugagaccaaggcccccgggcc

SEQ ID NO: 42983 - RNA, 12 nt, Homo sapiens
ccugagaccagc

SEQ ID NO: 42984 - RNA, 17 nt, Homo sapiens
ccugagaccagccaacc

SEQ ID NO: 42985 - RNA, 8 nt, Homo sapiens
ccugagcc

SEQ ID NO: 42986 - RNA, 9 nt, Homo sapiens
ccugagccc

SEQ ID NO: 42987 - RNA, 10 nt, Homo sapiens
ccugagcccc

SEQ ID NO: 42988 - RNA, 19 nt, Homo sapiens
ccugagcggaccuucccag

SEQ ID NO: 42989 - RNA, 20 nt, Homo sapiens
ccugagcggaccuucccagc

SEQ ID NO: 42990 - RNA, 21 nt, Homo sapiens
ccugagcggaccuucccagcu

SEQ ID NO: 42991 - RNA, 18 nt, Homo sapiens
ccugaugaaaacauagca

SEQ ID NO: 42992 - RNA, 13 nt, Homo sapiens
ccugcaauuccac

SEQ ID NO: 42993 - RNA, 14 nt, Homo sapiens
ccugcacuccagcc

SEQ ID NO: 42994 - RNA, 21 nt, Homo sapiens
ccugcacuccagccugagcga

SEQ ID NO: 42995 - RNA, 12 nt, Homo sapiens
ccugcaggcgug

SEQ ID NO: 42996 - RNA, 14 nt, Homo sapiens
ccugcaggcgugac

SEQ ID NO: 42997 - RNA, 15 nt, Homo sapiens
ccugcaggcgugacc

SEQ ID NO: 42998 - RNA, 19 nt, Homo sapiens
ccugcaggcgugaccugac

SEQ ID NO: 42999 - RNA, 14 nt, Homo sapiens
ccugccccugagcc

SEQ ID NO: 43000 - RNA, 15 nt, Homo sapiens
ccugccccugagccc

SEQ ID NO: 43001 - RNA, 16 nt, Homo sapiens
ccugccccugagccca

SEQ ID NO: 43002 - RNA, 20 nt, Homo sapiens
ccugcccuuacaggaacaga

SEQ ID NO: 43003 - RNA, 11 nt, Homo sapiens
ccugccuggau

SEQ ID NO: 43004 - RNA, 23 nt, Homo sapiens
ccugcuggauguggagggggcgc

SEQ ID NO: 43005 - RNA, 21 nt, Homo sapiens
ccugcuguuuccuagcgcagc

SEQ ID NO: 43006 - RNA, 22 nt, Homo sapiens
ccugcuguuuccuagcgcagcc

SEQ ID NO: 43007 - RNA, 13 nt, Homo sapiens
ccugcuuccuccg

SEQ ID NO: 43008 - RNA, 20 nt, Homo sapiens
ccuggaaaucaggguuagua

SEQ ID NO: 43009 - RNA, 17 nt, Homo sapiens
ccuggacaguuuucugc

SEQ ID NO: 43010 - RNA, 13 nt, Homo sapiens
ccuggauggcugc

SEQ ID NO: 43011 - RNA, 17 nt, Homo sapiens
ccuggauggcugccuca

SEQ ID NO: 43012 - RNA, 18 nt, Homo sapiens
ccuggauuccucacuuug

SEQ ID NO: 43013 - RNA, 21 nt, Homo sapiens
ccuggcaaagaugaucaguau

SEQ ID NO: 43014 - RNA, 17 nt, Homo sapiens
ccuggcugggaguggca

SEQ ID NO: 43015 - RNA, 16 nt, Homo sapiens
ccuggucaacauggug

SEQ ID NO: 43016 - RNA, 17 nt, Homo sapiens
ccuggucaacaugguga

SEQ ID NO: 43017 - RNA, 22 nt, Homo sapiens
ccuggucuaccuguucgcgcgc

SEQ ID NO: 43018 - RNA, 23 nt, Homo sapiens
ccuggucuaccuguucgcgcgcc

SEQ ID NO: 43019 - RNA, 13 nt, Homo sapiens
ccuguaaucacag

SEQ ID NO: 43020 - RNA, 15 nt, Homo sapiens
ccuguacuccagccu

SEQ ID NO: 43021 - RNA, 16 nt, Homo sapiens
ccuguacuccagccug

SEQ ID NO: 43022 - RNA, 21 nt, Homo sapiens
ccugucccugcagacaugaga

SEQ ID NO: 43023 - RNA, 11 nt, Homo sapiens
ccugugacugu

SEQ ID NO: 43024 - RNA, 12 nt, Homo sapiens
ccugugacuguc

SEQ ID NO: 43025 - RNA, 14 nt, Homo sapiens
ccugugcggccugg

SEQ ID NO: 43026 - RNA, 16 nt, Homo sapiens
ccugugcggccugguc

SEQ ID NO: 43027 - RNA, 15 nt, Homo sapiens
ccuguguuacugauu

SEQ ID NO: 43028 - RNA, 21 nt, Homo sapiens
ccuguuaaaagaugaaaauau

SEQ ID NO: 43029 - RNA, 14 nt, Homo sapiens
ccuguucgcgcgcc

SEQ ID NO: 43030 - RNA, 16 nt, Homo sapiens
ccuguucgcgcgccuc

SEQ ID NO: 43031 - RNA, 17 nt, Homo sapiens
ccuguucgcgcgccucc

SEQ ID NO: 43032 - RNA, 18 nt, Homo sapiens
ccuguucgcgcgccuccg

SEQ ID NO: 43033 - RNA, 20 nt, Homo sapiens
ccuguucgcgcgccuccgcu

SEQ ID NO: 43034 - RNA, 13 nt, Homo sapiens
ccuuaaacucagg

SEQ ID NO: 43035 - RNA, 18 nt, Homo sapiens
ccuuauucagaauuucua

SEQ ID NO: 43036 - RNA, 21 nt, Homo sapiens
ccuuauuguaccucucuuaua

SEQ ID NO: 43037 - RNA, 20 nt, Homo sapiens
ccuucauggcaggcaucgcc

SEQ ID NO: 43038 - RNA, 11 nt, Homo sapiens
ccuucauuuuu

SEQ ID NO: 43039 - RNA, 16 nt, Homo sapiens
ccuuccccuucccaca

SEQ ID NO: 43040 - RNA, 11 nt, Homo sapiens
ccuucugcucc

SEQ ID NO: 43041 - RNA, 16 nt, Homo sapiens
ccuucuggguucaagc

SEQ ID NO: 43042 - RNA, 15 nt, Homo sapiens
ccuugcuccuggcug

SEQ ID NO: 43043 - RNA, 16 nt, Homo sapiens
ccuugcuccuggcugg

SEQ ID NO: 43044 - RNA, 12 nt, Homo sapiens
ccuugcugcacc

SEQ ID NO: 43045 - RNA, 21 nt, Homo sapiens
ccuugcugcaccugugccguc

SEQ ID NO: 43046 - RNA, 17 nt, Homo sapiens
ccuuggggcugaugcag

SEQ ID NO: 43047 - RNA, 15 nt, Homo sapiens
ccuuuacauccagau

SEQ ID NO: 43048 - RNA, 19 nt, Homo sapiens
ccuuuggaugcacuuuaua

SEQ ID NO: 43049 - RNA, 13 nt, Homo sapiens
ccuuugggaaagg

SEQ ID NO: 43050 - RNA, 17 nt, Homo sapiens
ccuuuuacauacugcug

SEQ ID NO: 43051 - RNA, 12 nt, Homo sapiens
ccuuuucccaac

SEQ ID NO: 43052 - RNA, 15 nt, Homo sapiens
ccuuuuuuauacaua

SEQ ID NO: 43053 - RNA, 13 nt, Homo sapiens
cgaacugauguaa

SEQ ID NO: 43054 - RNA, 12 nt, Homo sapiens
cgaacugcugga

SEQ ID NO: 43055 - RNA, 13 nt, Homo sapiens
cgaacugcuggau

SEQ ID NO: 43056 - RNA, 20 nt, Homo sapiens
cgaaguauccuucagccuga

SEQ ID NO: 43057 - RNA, 21 nt, Homo sapiens
cgaaguauccuucagccugaa

SEQ ID NO: 43058 - RNA, 13 nt, Homo sapiens
cgaagucuuccau

SEQ ID NO: 43059 - RNA, 11 nt, Homo sapiens
cgacaguuuuc

SEQ ID NO: 43060 - RNA, 23 nt, Homo sapiens
cgacaguuuuccuucucaucugu

SEQ ID NO: 43061 - RNA, 16 nt, Homo sapiens
cgacggagccgggaaa

SEQ ID NO: 43062 - RNA, 23 nt, Homo sapiens
cgacggagccgggaaagaagagc

SEQ ID NO: 43063 - RNA, 12 nt, Homo sapiens
cgagccccaggc

SEQ ID NO: 43064 - RNA, 17 nt, Homo sapiens
cgagccccaggcggguc

SEQ ID NO: 43065 - RNA, 18 nt, Homo sapiens
cgagccccaggcgggucc

SEQ ID NO: 43066 - RNA, 22 nt, Homo sapiens
cgagccccaggcggguccgggu

SEQ ID NO: 43067 - RNA, 11 nt, Homo sapiens
cgagcgcgcgc

SEQ ID NO: 43068 - RNA, 15 nt, Homo sapiens
cgagcgcgcgcgccc

SEQ ID NO: 43069 - RNA, 17 nt, Homo sapiens
cgagcgcgcgcgcccuc

SEQ ID NO: 43070 - RNA, 18 nt, Homo sapiens
cgagcgcgcgcgcccucu

SEQ ID NO: 43071 - RNA, 17 nt, Homo sapiens
cgagcguugcugggggg

SEQ ID NO: 43072 - RNA, 20 nt, Homo sapiens
cgaguggcccuucauguaca

SEQ ID NO: 43073 - RNA, 21 nt, Homo sapiens
cgauuauuauuuuagagcauc

SEQ ID NO: 43074 - RNA, 16 nt, Homo sapiens
cgcaaugugacuuaau

SEQ ID NO: 43075 - RNA, 17 nt, Homo sapiens
cgcaccuguaaucccag

SEQ ID NO: 43076 - RNA, 19 nt, Homo sapiens
cgcaccuguaaucccagcu

SEQ ID NO: 43077 - RNA, 20 nt, Homo sapiens
cgcaccuguaaucccagcua

SEQ ID NO: 43078 - RNA, 14 nt, Homo sapiens
cgcagccaugugau

SEQ ID NO: 43079 - RNA, 15 nt, Homo sapiens
cgcagccaugugauu

SEQ ID NO: 43080 - RNA, 15 nt, Homo sapiens
cgcagcucaggcugg

SEQ ID NO: 43081 - RNA, 16 nt, Homo sapiens
cgcagcucaggcuggc

SEQ ID NO: 43082 - RNA, 18 nt, Homo sapiens
cgcagcucaggcuggcac

SEQ ID NO: 43083 - RNA, 20 nt, Homo sapiens
cgcagcucaggcuggcaccg

SEQ ID NO: 43084 - RNA, 19 nt, Homo sapiens
cgcaggaccaucccggccg

SEQ ID NO: 43085 - RNA, 20 nt, Homo sapiens
cgcaggaccaucccggccgg

SEQ ID NO: 43086 - RNA, 22 nt, Homo sapiens
cgcaggaccaucccggccggcg

SEQ ID NO: 43087 - RNA, 20 nt, Homo sapiens
cgcaggcccccaggugccag

SEQ ID NO: 43088 - RNA, 15 nt, Homo sapiens
cgcauccuagucucu

SEQ ID NO: 43089 - RNA, 17 nt, Homo sapiens
cgcauccuagucucuau

SEQ ID NO: 43090 - RNA, 14 nt, Homo sapiens
cgccaccacgccca

SEQ ID NO: 43091 - RNA, 17 nt, Homo sapiens
cgccaccacgcccagcu

SEQ ID NO: 43092 - RNA, 13 nt, Homo sapiens
cgccacgcucugg

SEQ ID NO: 43093 - RNA, 14 nt, Homo sapiens
cgccacgcucuggg

SEQ ID NO: 43094 - RNA, 18 nt, Homo sapiens
cgccacgcucugggucgc

SEQ ID NO: 43095 - RNA, 21 nt, Homo sapiens
cgccacgcucugggucgccgg

SEQ ID NO: 43096 - RNA, 23 nt, Homo sapiens
cgccacgcucugggucgccggca

SEQ ID NO: 43097 - RNA, 15 nt, Homo sapiens
cgcccacuuccuccc

SEQ ID NO: 43098 - RNA, 17 nt, Homo sapiens
cgcccacuuccucccgg

SEQ ID NO: 43099 - RNA, 18 nt, Homo sapiens
cgcccacuuccucccggc

SEQ ID NO: 43100 - RNA, 21 nt, Homo sapiens
cgcccacuuccucccggccgc

SEQ ID NO: 43101 - RNA, 22 nt, Homo sapiens
cgcccacuuccucccggccgcg

SEQ ID NO: 43102 - RNA, 11 nt, Homo sapiens
cgcccucuggc

SEQ ID NO: 43103 - RNA, 18 nt, Homo sapiens
cgcccucuggcugcuggu

SEQ ID NO: 43104 - RNA, 15 nt, Homo sapiens
cgccgcgcuccucgg

SEQ ID NO: 43105 - RNA, 21 nt, Homo sapiens
cgccuccgcuacuuccagggc

SEQ ID NO: 43106 - RNA, 13 nt, Homo sapiens
cgccuguaauccc

SEQ ID NO: 43107 - RNA, 15 nt, Homo sapiens
cgccuguaaucccag

SEQ ID NO: 43108 - RNA, 16 nt, Homo sapiens
cgccuguaaucccagc

SEQ ID NO: 43109 - RNA, 16 nt, Homo sapiens
cgcgagcgcgcgcgcc

SEQ ID NO: 43110 - RNA, 17 nt, Homo sapiens
cgcgagcgcgcgcgccc

SEQ ID NO: 43111 - RNA, 18 nt, Homo sapiens
cgcgagcgcgcgcgcccu

SEQ ID NO: 43112 - RNA, 21 nt, Homo sapiens
cgcgagcgcgcgcgcccucug

SEQ ID NO: 43113 - RNA, 12 nt, Homo sapiens
cgcgcaccugua

SEQ ID NO: 43114 - RNA, 20 nt, Homo sapiens
cgcgcaccuguaaucccagc

SEQ ID NO: 43115 - RNA, 21 nt, Homo sapiens
cgcgcaccuguaaucccagcu

SEQ ID NO: 43116 - RNA, 13 nt, Homo sapiens
cgcgcagcucagg

SEQ ID NO: 43117 - RNA, 14 nt, Homo sapiens
cgcgcagcucaggc

SEQ ID NO: 43118 - RNA, 20 nt, Homo sapiens
cgcgcagcucaggcuggcac

SEQ ID NO: 43119 - RNA, 21 nt, Homo sapiens
cgcgcagcucaggcuggcacc

SEQ ID NO: 43120 - RNA, 19 nt, Homo sapiens
cgcgccaccacgcccagcu

SEQ ID NO: 43121 - RNA, 13 nt, Homo sapiens
cgcgcccucuggc

SEQ ID NO: 43122 - RNA, 15 nt, Homo sapiens
cgcgcccucuggcug

SEQ ID NO: 43123 - RNA, 16 nt, Homo sapiens
cgcgcccucuggcugc

SEQ ID NO: 43124 - RNA, 18 nt, Homo sapiens
cgcgcccucuggcugcug

SEQ ID NO: 43125 - RNA, 20 nt, Homo sapiens
cgcgcccucuggcugcuggu

SEQ ID NO: 43126 - RNA, 23 nt, Homo sapiens
cgcgcccucuggcugcugguggc

SEQ ID NO: 43127 - RNA, 15 nt, Homo sapiens
cgcgccgcgcuccuc

SEQ ID NO: 43128 - RNA, 18 nt, Homo sapiens
cgcgccgcgcuccucgga

SEQ ID NO: 43129 - RNA, 19 nt, Homo sapiens
cgcgccgcgcuccucggac

SEQ ID NO: 43130 - RNA, 22 nt, Homo sapiens
cgcgccgcgcuccucggacggc

SEQ ID NO: 43131 - RNA, 13 nt, Homo sapiens
cgcgccuccgcua

SEQ ID NO: 43132 - RNA, 13 nt, Homo sapiens
cgcgcgccaccac

SEQ ID NO: 43133 - RNA, 14 nt, Homo sapiens
cgcgcgccaccacg

SEQ ID NO: 43134 - RNA, 15 nt, Homo sapiens
cgcgcgccaccacgc

SEQ ID NO: 43135 - RNA, 17 nt, Homo sapiens
cgcgcgccaccacgccc

SEQ ID NO: 43136 - RNA, 18 nt, Homo sapiens
cgcgcgccaccacgccca

SEQ ID NO: 43137 - RNA, 13 nt, Homo sapiens
cgcgcgcccucug

SEQ ID NO: 43138 - RNA, 14 nt, Homo sapiens
cgcgcgcccucugg

SEQ ID NO: 43139 - RNA, 10 nt, Homo sapiens
cgcgcgccuc

SEQ ID NO: 43140 - RNA, 14 nt, Homo sapiens
cgcgcgccuccgcu

SEQ ID NO: 43141 - RNA, 17 nt, Homo sapiens
cgcgcgccuccgcuacu

SEQ ID NO: 43142 - RNA, 18 nt, Homo sapiens
cgcgcgccuccgcuacuu

SEQ ID NO: 43143 - RNA, 23 nt, Homo sapiens
cgcgcgccuccgcuacuuccagg

SEQ ID NO: 43144 - RNA, 12 nt, Homo sapiens
cgcgcgcgcccu

SEQ ID NO: 43145 - RNA, 13 nt, Homo sapiens
cgcgcgcgcccuc

SEQ ID NO: 43146 - RNA, 11 nt, Homo sapiens
cgcgcgcuccg

SEQ ID NO: 43147 - RNA, 12 nt, Homo sapiens
cgcgcgcuccgc

SEQ ID NO: 43148 - RNA, 15 nt, Homo sapiens
cgcgcgcuccgcgca

SEQ ID NO: 43149 - RNA, 18 nt, Homo sapiens
cgcgcgcuccgcgcagcu

SEQ ID NO: 43150 - RNA, 22 nt, Homo sapiens
cgcgcucaucccacccgcccac

SEQ ID NO: 43151 - RNA, 11 nt, Homo sapiens
cgcgcuccgcg

SEQ ID NO: 43152 - RNA, 15 nt, Homo sapiens
cgcgcuccgcgcagc

SEQ ID NO: 43153 - RNA, 16 nt, Homo sapiens
cgcgcuccgcgcagcu

SEQ ID NO: 43154 - RNA, 16 nt, Homo sapiens
cgcgcuccucggacgg

SEQ ID NO: 43155 - RNA, 17 nt, Homo sapiens
cgcgcuccucggacggc

SEQ ID NO: 43156 - RNA, 11 nt, Homo sapiens
cgcgcugcgcg

SEQ ID NO: 43157 - RNA, 13 nt, Homo sapiens
cgcgcugcgcgcc

SEQ ID NO: 43158 - RNA, 14 nt, Homo sapiens
cgcgcugcgcgccg

SEQ ID NO: 43159 - RNA, 17 nt, Homo sapiens
cgcgcugcgcgccgcgc

SEQ ID NO: 43160 - RNA, 19 nt, Homo sapiens
cgcgcugcgcgccgcgcuc

SEQ ID NO: 43161 - RNA, 20 nt, Homo sapiens
cgcgcugcgcgccgcgcucc

SEQ ID NO: 43162 - RNA, 19 nt, Homo sapiens
cgcggcgggagggcgcggg

SEQ ID NO: 43163 - RNA, 22 nt, Homo sapiens
cgcggcgggagggcgcggggcg

SEQ ID NO: 43164 - RNA, 16 nt, Homo sapiens
cgcggggcggggagcg

SEQ ID NO: 43165 - RNA, 23 nt, Homo sapiens
cgcggggcggggagcgagcccca

SEQ ID NO: 43166 - RNA, 16 nt, Homo sapiens
cgcgguggcucacgcc

SEQ ID NO: 43167 - RNA, 11 nt, Homo sapiens
cgcgugcaggc

SEQ ID NO: 43168 - RNA, 14 nt, Homo sapiens
cgcgugcaggcagc

SEQ ID NO: 43169 - RNA, 16 nt, Homo sapiens
cgcuaccucuccagcc

SEQ ID NO: 43170 - RNA, 16 nt, Homo sapiens
cgcuacuuccagggcu

SEQ ID NO: 43171 - RNA, 17 nt, Homo sapiens
cgcuacuuccagggcua

SEQ ID NO: 43172 - RNA, 22 nt, Homo sapiens
cgcuacuuccagggcuacgcgc

SEQ ID NO: 43173 - RNA, 12 nt, Homo sapiens
cgcucaucccac

SEQ ID NO: 43174 - RNA, 23 nt, Homo sapiens
cgcucaucccacccgcccaccgc

SEQ ID NO: 43175 - RNA, 14 nt, Homo sapiens
cgcuccgcgcagcu

SEQ ID NO: 43176 - RNA, 20 nt, Homo sapiens
cgcuccucggacggcuccgg

SEQ ID NO: 43177 - RNA, 13 nt, Homo sapiens
cgcucgcuuccgc

SEQ ID NO: 43178 - RNA, 15 nt, Homo sapiens
cgcucgcuuccgcau

SEQ ID NO: 43179 - RNA, 16 nt, Homo sapiens
cgcucgcuuccgcauc

SEQ ID NO: 43180 - RNA, 17 nt, Homo sapiens
cgcucgcuuccgcaucc

SEQ ID NO: 43181 - RNA, 11 nt, Homo sapiens
cgcucggccug

SEQ ID NO: 43182 - RNA, 14 nt, Homo sapiens
cgcucggccugcuc

SEQ ID NO: 43183 - RNA, 15 nt, Homo sapiens
cgcucggccugcucg

SEQ ID NO: 43184 - RNA, 18 nt, Homo sapiens
cgcucggccugcucgccc

SEQ ID NO: 43185 - RNA, 19 nt, Homo sapiens
cgcucggccugcucgccca

SEQ ID NO: 43186 - RNA, 14 nt, Homo sapiens
cgcucugggucgcc

SEQ ID NO: 43187 - RNA, 17 nt, Homo sapiens
cgcucugggucgccggc

SEQ ID NO: 43188 - RNA, 18 nt, Homo sapiens
cgcucugggucgccggca

SEQ ID NO: 43189 - RNA, 19 nt, Homo sapiens
cgcucugggucgccggcau

SEQ ID NO: 43190 - RNA, 20 nt, Homo sapiens
cgcucugggucgccggcauc

SEQ ID NO: 43191 - RNA, 11 nt, Homo sapiens
cgcugcgcgcc

SEQ ID NO: 43192 - RNA, 12 nt, Homo sapiens
cgcugcgcgccg

SEQ ID NO: 43193 - RNA, 13 nt, Homo sapiens
cgcugcgcgccgc

SEQ ID NO: 43194 - RNA, 16 nt, Homo sapiens
cgcugcgcgccgcgcu

SEQ ID NO: 43195 - RNA, 19 nt, Homo sapiens
cgcugcgcgccgcgcuccu

SEQ ID NO: 43196 - RNA, 15 nt, Homo sapiens
cgcugcugccguggg

SEQ ID NO: 43197 - RNA, 12 nt, Homo sapiens
cgcuggcugcgc

SEQ ID NO: 43198 - RNA, 13 nt, Homo sapiens
cgcuggcugcgcu

SEQ ID NO: 43199 - RNA, 16 nt, Homo sapiens
cgcuggcugcgcucgg

SEQ ID NO: 43200 - RNA, 19 nt, Homo sapiens
cgcuggcugcgcucggccu

SEQ ID NO: 43201 - RNA, 21 nt, Homo sapiens
cgcuggcugcgcucggccugc

SEQ ID NO: 43202 - RNA, 14 nt, Homo sapiens
cgcuguacgcgagc

SEQ ID NO: 43203 - RNA, 16 nt, Homo sapiens
cgcuguacgcgagcgc

SEQ ID NO: 43204 - RNA, 18 nt, Homo sapiens
cgcuguacgcgagcgcgc

SEQ ID NO: 43205 - RNA, 20 nt, Homo sapiens
cgcuguacgcgagcgcgcgc

SEQ ID NO: 43206 - RNA, 22 nt, Homo sapiens
cgcuguacgcgagcgcgcgcgc

SEQ ID NO: 43207 - RNA, 13 nt, Homo sapiens
cgcuguuccucgc

SEQ ID NO: 43208 - RNA, 16 nt, Homo sapiens
cgcuguuccucgccac

SEQ ID NO: 43209 - RNA, 18 nt, Homo sapiens
cgcuguuccucgccacgc

SEQ ID NO: 43210 - RNA, 21 nt, Homo sapiens
cgcuguuccucgccacgcucu

SEQ ID NO: 43211 - RNA, 23 nt, Homo sapiens
cgcuguuccucgccacgcucugg

SEQ ID NO: 43212 - RNA, 14 nt, Homo sapiens
cgcuuaagcuuuca

SEQ ID NO: 43213 - RNA, 16 nt, Homo sapiens
cgcuuccgcauccuag

SEQ ID NO: 43214 - RNA, 22 nt, Homo sapiens
cgcuuccgcauccuagucucua

SEQ ID NO: 43215 - RNA, 16 nt, Homo sapiens
cgcuuuugauaaucaa

SEQ ID NO: 43216 - RNA, 17 nt, Homo sapiens
cgcuuuugauaaucaac

SEQ ID NO: 43217 - RNA, 13 nt, Homo sapiens
cggaacucaaaua

SEQ ID NO: 43218 - RNA, 11 nt, Homo sapiens
cggaagccaaa

SEQ ID NO: 43219 - RNA, 16 nt, Homo sapiens
cggacgcugcugccgu

SEQ ID NO: 43220 - RNA, 18 nt, Homo sapiens
cggacgcugcugccgugg

SEQ ID NO: 43221 - RNA, 21 nt, Homo sapiens
cggacgcugcugccgugggcc

SEQ ID NO: 43222 - RNA, 13 nt, Homo sapiens
cggacggcuccgg

SEQ ID NO: 43223 - RNA, 16 nt, Homo sapiens
cggacggcuccggacg

SEQ ID NO: 43224 - RNA, 20 nt, Homo sapiens
cggacuccuccgcauccucc

SEQ ID NO: 43225 - RNA, 22 nt, Homo sapiens
cggagaagagcuguucacagcc

SEQ ID NO: 43226 - RNA, 13 nt, Homo sapiens
cggagccuccagc

SEQ ID NO: 43227 - RNA, 15 nt, Homo sapiens
cggagccuccagcug

SEQ ID NO: 43228 - RNA, 16 nt, Homo sapiens
cggagccuccagcugc

SEQ ID NO: 43229 - RNA, 17 nt, Homo sapiens
cggagccuccagcugcc

SEQ ID NO: 43230 - RNA, 20 nt, Homo sapiens
cggagccuccagcugccccg

SEQ ID NO: 43231 - RNA, 21 nt, Homo sapiens
cggagccuccagcugccccgg

SEQ ID NO: 43232 - RNA, 22 nt, Homo sapiens
cggagccuccagcugccccggg

SEQ ID NO: 43233 - RNA, 21 nt, Homo sapiens
cggaucuggggcucugggaua

SEQ ID NO: 43234 - RNA, 23 nt, Homo sapiens
cggauugagaaggagcucccagg

SEQ ID NO: 43235 - RNA, 16 nt, Homo sapiens
cggcagggaaauguau

SEQ ID NO: 43236 - RNA, 17 nt, Homo sapiens
cggcccugugcggccug

SEQ ID NO: 43237 - RNA, 21 nt, Homo sapiens
cggcccugugcggccuggucu

SEQ ID NO: 43238 - RNA, 11 nt, Homo sapiens
cggccgcgcug

SEQ ID NO: 43239 - RNA, 13 nt, Homo sapiens
cggccgcgcugcg

SEQ ID NO: 43240 - RNA, 14 nt, Homo sapiens
cggccgcgcugcgc

SEQ ID NO: 43241 - RNA, 16 nt, Homo sapiens
cggccgcgcugcgcgc

SEQ ID NO: 43242 - RNA, 17 nt, Homo sapiens
cggccgcgcugcgcgcc

SEQ ID NO: 43243 - RNA, 19 nt, Homo sapiens
cggccgcgcugcgcgccgc

SEQ ID NO: 43244 - RNA, 12 nt, Homo sapiens
cggccggcgcgc

SEQ ID NO: 43245 - RNA, 14 nt, Homo sapiens
cggccggcgcgcuc

SEQ ID NO: 43246 - RNA, 15 nt, Homo sapiens
cggccggcgcgcuca

SEQ ID NO: 43247 - RNA, 16 nt, Homo sapiens
cggccggcgcgcucau

SEQ ID NO: 43248 - RNA, 13 nt, Homo sapiens
cggccugcucgcc

SEQ ID NO: 43249 - RNA, 15 nt, Homo sapiens
cggccugcucgccca

SEQ ID NO: 43250 - RNA, 20 nt, Homo sapiens
cggccuggucuaccuguucg

SEQ ID NO: 43251 - RNA, 21 nt, Homo sapiens
cggccuggucuaccuguucgc

SEQ ID NO: 43252 - RNA, 24 nt, Homo sapiens
cggccuggucuaccuguucgcgcg

SEQ ID NO: 43253 - RNA, 16 nt, Homo sapiens
cggcgcgcucauccca

SEQ ID NO: 43254 - RNA, 10 nt, Homo sapiens
cggcggcccu

SEQ ID NO: 43255 - RNA, 11 nt, Homo sapiens
cggcggcccug

SEQ ID NO: 43256 - RNA, 12 nt, Homo sapiens
cggcggcccugu

SEQ ID NO: 43257 - RNA, 13 nt, Homo sapiens
cggcggcccugug

SEQ ID NO: 43258 - RNA, 15 nt, Homo sapiens
cggcggcccugugcg

SEQ ID NO: 43259 - RNA, 16 nt, Homo sapiens
cggcggcccugugcgg

SEQ ID NO: 43260 - RNA, 20 nt, Homo sapiens
cggcggcccugugcggccug

SEQ ID NO: 43261 - RNA, 22 nt, Homo sapiens
cggcggcccugugcggccuggu

SEQ ID NO: 43262 - RNA, 16 nt, Homo sapiens
cggcgggagggcgcgg

SEQ ID NO: 43263 - RNA, 17 nt, Homo sapiens
cggcgggagggcgcggg

SEQ ID NO: 43264 - RNA, 14 nt, Homo sapiens
cggcuccggacgcu

SEQ ID NO: 43265 - RNA, 16 nt, Homo sapiens
cggcuccggacgcugc

SEQ ID NO: 43266 - RNA, 17 nt, Homo sapiens
cggcuccggacgcugcu

SEQ ID NO: 43267 - RNA, 21 nt, Homo sapiens
cggcuccggacgcugcugccg

SEQ ID NO: 43268 - RNA, 16 nt, Homo sapiens
cgggaaagaagagccg

SEQ ID NO: 43269 - RNA, 20 nt, Homo sapiens
cgggaaagaagagccggagc

SEQ ID NO: 43270 - RNA, 22 nt, Homo sapiens
cgggaaagaagagccggagccu

SEQ ID NO: 43271 - RNA, 15 nt, Homo sapiens
cgggacacaggcucc

SEQ ID NO: 43272 - RNA, 22 nt, Homo sapiens
cgggacacaggcuccaaacugg

SEQ ID NO: 43273 - RNA, 20 nt, Homo sapiens
cgggaggcagagguugcagu

SEQ ID NO: 43274 - RNA, 13 nt, Homo sapiens
cgggagggcgcgg

SEQ ID NO: 43275 - RNA, 14 nt, Homo sapiens
cgggagggcgcggg

SEQ ID NO: 43276 - RNA, 17 nt, Homo sapiens
cgggagggcgcggggcg

SEQ ID NO: 43277 - RNA, 18 nt, Homo sapiens
cgggagggcgcggggcgg

SEQ ID NO: 43278 - RNA, 19 nt, Homo sapiens
cgggagggcgcggggcggg

SEQ ID NO: 43279 - RNA, 21 nt, Homo sapiens
cgggagggcgcggggcgggga

SEQ ID NO: 43280 - RNA, 12 nt, Homo sapiens
cgggaguggcgc

SEQ ID NO: 43281 - RNA, 19 nt, Homo sapiens
cgggaguggcgcgcgccac

SEQ ID NO: 43282 - RNA, 21 nt, Homo sapiens
cgggaguggcgcgcgccacca

SEQ ID NO: 43283 - RNA, 22 nt, Homo sapiens
cgggaguggcgcgcgccaccac

SEQ ID NO: 43284 - RNA, 13 nt, Homo sapiens
cgggcaugguggc

SEQ ID NO: 43285 - RNA, 12 nt, Homo sapiens
cgggccgacgga

SEQ ID NO: 43286 - RNA, 15 nt, Homo sapiens
cgggccgacggagcc

SEQ ID NO: 43287 - RNA, 16 nt, Homo sapiens
cgggccgacggagccg

SEQ ID NO: 43288 - RNA, 17 nt, Homo sapiens
cgggccgacggagccgg

SEQ ID NO: 43289 - RNA, 18 nt, Homo sapiens
cgggccgacggagccggg

SEQ ID NO: 43290 - RNA, 20 nt, Homo sapiens
cgggccgacggagccgggaa

SEQ ID NO: 43291 - RNA, 21 nt, Homo sapiens
cgggccgacggagccgggaaa

SEQ ID NO: 43292 - RNA, 12 nt, Homo sapiens
cgggcgcggugg

SEQ ID NO: 43293 - RNA, 15 nt, Homo sapiens
cgggcguggugguga

SEQ ID NO: 43294 - RNA, 12 nt, Homo sapiens
cggggagcgagc

SEQ ID NO: 43295 - RNA, 14 nt, Homo sapiens
cggggagcgagccc

SEQ ID NO: 43296 - RNA, 19 nt, Homo sapiens
cggggagcgagccccaggc

SEQ ID NO: 43297 - RNA, 21 nt, Homo sapiens
cggggagcgagccccaggcgg

SEQ ID NO: 43298 - RNA, 22 nt, Homo sapiens
cggggagcgagccccaggcggg

SEQ ID NO: 43299 - RNA, 14 nt, Homo sapiens
cggggaggggcgcu

SEQ ID NO: 43300 - RNA, 18 nt, Homo sapiens
cggggaggggcgcucgcu

SEQ ID NO: 43301 - RNA, 20 nt, Homo sapiens
cggggaggggcgcucgcuuc

SEQ ID NO: 43302 - RNA, 14 nt, Homo sapiens
cggggcggggagcg

SEQ ID NO: 43303 - RNA, 16 nt, Homo sapiens
cggggcggggagcgag

SEQ ID NO: 43304 - RNA, 17 nt, Homo sapiens
cggggcggggagcgagc

SEQ ID NO: 43305 - RNA, 18 nt, Homo sapiens
cggggcggggagcgagcc

SEQ ID NO: 43306 - RNA, 19 nt, Homo sapiens
cgggguuugccaugcuggc

SEQ ID NO: 43307 - RNA, 21 nt, Homo sapiens
cgggguuugccaugcuggcca

SEQ ID NO: 43308 - RNA, 13 nt, Homo sapiens
cggguccgggucg

SEQ ID NO: 43309 - RNA, 15 nt, Homo sapiens
cggguccgggucgca

SEQ ID NO: 43310 - RNA, 22 nt, Homo sapiens
cgggucgcaggaccaucccggc

SEQ ID NO: 43311 - RNA, 14 nt, Homo sapiens
cgguccuugcugca

SEQ ID NO: 43312 - RNA, 16 nt, Homo sapiens
cgguuuaaugggcaca

SEQ ID NO: 43313 - RNA, 12 nt, Homo sapiens
cguacacauuuu

SEQ ID NO: 43314 - RNA, 16 nt, Homo sapiens
cguauugcauuuaauu

SEQ ID NO: 43315 - RNA, 17 nt, Homo sapiens
cguccccagagcuacag

SEQ ID NO: 43316 - RNA, 12 nt, Homo sapiens
cguccuuccacu

SEQ ID NO: 43317 - RNA, 14 nt, Homo sapiens
cguccuuccacuuc

SEQ ID NO: 43318 - RNA, 19 nt, Homo sapiens
cgucucccaaagugcuggg

SEQ ID NO: 43319 - RNA, 21 nt, Homo sapiens
cgugaccugacagcccaaggg

SEQ ID NO: 43320 - RNA, 13 nt, Homo sapiens
cgugacuggccug

SEQ ID NO: 43321 - RNA, 19 nt, Homo sapiens
cgugacuggccugcuggau

SEQ ID NO: 43322 - RNA, 21 nt, Homo sapiens
cgugacuggccugcuggaugu

SEQ ID NO: 43323 - RNA, 13 nt, Homo sapiens
cgugagccaccaa

SEQ ID NO: 43324 - RNA, 14 nt, Homo sapiens
cgugagccaccaaa

SEQ ID NO: 43325 - RNA, 15 nt, Homo sapiens
cgugagccaccaaac

SEQ ID NO: 43326 - RNA, 17 nt, Homo sapiens
cgugagccaccaaaccc

SEQ ID NO: 43327 - RNA, 21 nt, Homo sapiens
cgugagccaccaaacccggcc

SEQ ID NO: 43328 - RNA, 16 nt, Homo sapiens
cgugauuuugcuguag

SEQ ID NO: 43329 - RNA, 9 nt, Homo sapiens
cgugcaaua

SEQ ID NO: 43330 - RNA, 17 nt, Homo sapiens
cgugcaggcagcaggau

SEQ ID NO: 43331 - RNA, 16 nt, Homo sapiens
cgugggacagucaccu

SEQ ID NO: 43332 - RNA, 14 nt, Homo sapiens
cgugggccugagac

SEQ ID NO: 43333 - RNA, 12 nt, Homo sapiens
cgugugccugag

SEQ ID NO: 43334 - RNA, 15 nt, Homo sapiens
cguugcuggggggga

SEQ ID NO: 43335 - RNA, 14 nt, Homo sapiens
cguugugcauuugg

SEQ ID NO: 43336 - RNA, 19 nt, Homo sapiens
cguuucuaugacacaugca

SEQ ID NO: 43337 - RNA, 16 nt, Homo sapiens
cguuugugauugccau

SEQ ID NO: 43338 - RNA, 18 nt, Homo sapiens
cuaaaaggccugucccug

SEQ ID NO: 43339 - RNA, 14 nt, Homo sapiens
cuaaaauguucuaa

SEQ ID NO: 43340 - RNA, 16 nt, Homo sapiens
cuaaacauguauguaa

SEQ ID NO: 43341 - RNA, 17 nt, Homo sapiens
cuaaacauguauguaaa

SEQ ID NO: 43342 - RNA, 16 nt, Homo sapiens
cuaaaguaucuguauu

SEQ ID NO: 43343 - RNA, 17 nt, Homo sapiens
cuaaaucaauucuauua

SEQ ID NO: 43344 - RNA, 17 nt, Homo sapiens
cuaaccagccuggucaa

SEQ ID NO: 43345 - RNA, 20 nt, Homo sapiens
cuaaccucauuccccaacca

SEQ ID NO: 43346 - RNA, 24 nt, Homo sapiens
cuaacucagaaacaucaguuacuc

SEQ ID NO: 43347 - RNA, 22 nt, Homo sapiens
cuaaguaaaaccacagcaguug

SEQ ID NO: 43348 - RNA, 14 nt, Homo sapiens
cuaagucccugcug

SEQ ID NO: 43349 - RNA, 16 nt, Homo sapiens
cuaauaaaaaggugac

SEQ ID NO: 43350 - RNA, 18 nt, Homo sapiens
cuaauaaaauacauacua

SEQ ID NO: 43351 - RNA, 17 nt, Homo sapiens
cuaauguguaagacaaa

SEQ ID NO: 43352 - RNA, 13 nt, Homo sapiens
cuaauuaggcaag

SEQ ID NO: 43353 - RNA, 19 nt, Homo sapiens
cuacaaaauauagcuuuca

SEQ ID NO: 43354 - RNA, 20 nt, Homo sapiens
cuacaaaauauagcuuucau

SEQ ID NO: 43355 - RNA, 19 nt, Homo sapiens
cuacaauuguaaacuaguu

SEQ ID NO: 43356 - RNA, 19 nt, Homo sapiens
cuacagccaggcggcugga

SEQ ID NO: 43357 - RNA, 19 nt, Homo sapiens
cuacaguguacagucuugu

SEQ ID NO: 43358 - RNA, 16 nt, Homo sapiens
cuacauacuauggaau

SEQ ID NO: 43359 - RNA, 16 nt, Homo sapiens
cuaccaaaaaucucaa

SEQ ID NO: 43360 - RNA, 16 nt, Homo sapiens
cuaccagcccuacacc

SEQ ID NO: 43361 - RNA, 18 nt, Homo sapiens
cuaccagcccuacaccau

SEQ ID NO: 43362 - RNA, 12 nt, Homo sapiens
cuaccucuccag

SEQ ID NO: 43363 - RNA, 18 nt, Homo sapiens
cuaccuguucgcgcgccu

SEQ ID NO: 43364 - RNA, 19 nt, Homo sapiens
cuaccuguucgcgcgccuc

SEQ ID NO: 43365 - RNA, 20 nt, Homo sapiens
cuaccuguucgcgcgccucc

SEQ ID NO: 43366 - RNA, 22 nt, Homo sapiens
cuaccuguucgcgcgccuccgc

SEQ ID NO: 43367 - RNA, 10 nt, Homo sapiens
cuacgcgcgc

SEQ ID NO: 43368 - RNA, 11 nt, Homo sapiens
cuacgcgcgcu

SEQ ID NO: 43369 - RNA, 13 nt, Homo sapiens
cuacgcgcgcucc

SEQ ID NO: 43370 - RNA, 17 nt, Homo sapiens
cuacgcgcgcuccgcgc

SEQ ID NO: 43371 - RNA, 23 nt, Homo sapiens
cuacgcgcgcuccgcgcagcuca

SEQ ID NO: 43372 - RNA, 16 nt, Homo sapiens
cuacucuguuccuuca

SEQ ID NO: 43373 - RNA, 23 nt, Homo sapiens
cuacucuguuccuucacauccug

SEQ ID NO: 43374 - RNA, 18 nt, Homo sapiens
cuacuguaauuugugaua

SEQ ID NO: 43375 - RNA, 12 nt, Homo sapiens
cuacuugcacac

SEQ ID NO: 43376 - RNA, 20 nt, Homo sapiens
cuacuugggaggcugagaug

SEQ ID NO: 43377 - RNA, 19 nt, Homo sapiens
cuacuugggaggcugaggc

SEQ ID NO: 43378 - RNA, 20 nt, Homo sapiens
cuacuugggaggcugaggca

SEQ ID NO: 43379 - RNA, 22 nt, Homo sapiens
cuagaauacuaauaaaauacau

SEQ ID NO: 43380 - RNA, 15 nt, Homo sapiens
cuagaauucacucca

SEQ ID NO: 43381 - RNA, 16 nt, Homo sapiens
cuagaauuugauaugu

SEQ ID NO: 43382 - RNA, 13 nt, Homo sapiens
cuagaguuuagcu

SEQ ID NO: 43383 - RNA, 13 nt, Homo sapiens
cuagauacuguau

SEQ ID NO: 43384 - RNA, 18 nt, Homo sapiens
cuagauacuguaucauga

SEQ ID NO: 43385 - RNA, 14 nt, Homo sapiens
cuagauagucaaua

SEQ ID NO: 43386 - RNA, 20 nt, Homo sapiens
cuagcaaauguuaugcauaa

SEQ ID NO: 43387 - RNA, 15 nt, Homo sapiens
cuagcccuuacgucc

SEQ ID NO: 43388 - RNA, 20 nt, Homo sapiens
cuagcccuuacguccuucca

SEQ ID NO: 43389 - RNA, 15 nt, Homo sapiens
cuagcuaauaucaau

SEQ ID NO: 43390 - RNA, 20 nt, Homo sapiens
cuaggaaauauuuauuuuaa

SEQ ID NO: 43391 - RNA, 12 nt, Homo sapiens
cuaggccgggcg

SEQ ID NO: 43392 - RNA, 13 nt, Homo sapiens
cuaggccgggcgc

SEQ ID NO: 43393 - RNA, 18 nt, Homo sapiens
cuaggccgggcgcggugg

SEQ ID NO: 43394 - RNA, 17 nt, Homo sapiens
cuaggggggucagccag

SEQ ID NO: 43395 - RNA, 19 nt, Homo sapiens
cuaggggggucagccagcc

SEQ ID NO: 43396 - RNA, 15 nt, Homo sapiens
cuaggugcugcagcc

SEQ ID NO: 43397 - RNA, 23 nt, Homo sapiens
cuaguaauuggaaaggcagcucu

SEQ ID NO: 43398 - RNA, 17 nt, Homo sapiens
cuagucucuaucauuaa

SEQ ID NO: 43399 - RNA, 13 nt, Homo sapiens
cuagugaccgaga

SEQ ID NO: 43400 - RNA, 14 nt, Homo sapiens
cuaguuguaauuuu

SEQ ID NO: 43401 - RNA, 23 nt, Homo sapiens
cuaguuguaauuuuuuuguggga

SEQ ID NO: 43402 - RNA, 14 nt, Homo sapiens
cuaguuucccuugc

SEQ ID NO: 43403 - RNA, 18 nt, Homo sapiens
cuauaaaacuaggugcug

SEQ ID NO: 43404 - RNA, 18 nt, Homo sapiens
cuauaaaccgaacugaug

SEQ ID NO: 43405 - RNA, 23 nt, Homo sapiens
cuauaggugcuacaaaaacacag

SEQ ID NO: 43406 - RNA, 22 nt, Homo sapiens
cuauauccugugacugucucac

SEQ ID NO: 43407 - RNA, 13 nt, Homo sapiens
cuauauuaucaug

SEQ ID NO: 43408 - RNA, 15 nt, Homo sapiens
cuauauuguuugcua

SEQ ID NO: 43409 - RNA, 23 nt, Homo sapiens
cuaucagcauuuuacuacuuuaa

SEQ ID NO: 43410 - RNA, 19 nt, Homo sapiens
cuaucccaaccucucccaa

SEQ ID NO: 43411 - RNA, 14 nt, Homo sapiens
cuaucgccaucaca

SEQ ID NO: 43412 - RNA, 13 nt, Homo sapiens
cuaucucauuucc

SEQ ID NO: 43413 - RNA, 21 nt, Homo sapiens
cuauguagaauauauuuccuu

SEQ ID NO: 43414 - RNA, 14 nt, Homo sapiens
cuaugugauuacaa

SEQ ID NO: 43415 - RNA, 21 nt, Homo sapiens
cuauguuaauauuuuaugugu

SEQ ID NO: 43416 - RNA, 22 nt, Homo sapiens
cuauguucuaagaagugaaaau

SEQ ID NO: 43417 - RNA, 17 nt, Homo sapiens
cuauguuguugcacuuu

SEQ ID NO: 43418 - RNA, 15 nt, Homo sapiens
cuauuacgugcaaua

SEQ ID NO: 43419 - RNA, 16 nt, Homo sapiens
cuauuacgugcaauac

SEQ ID NO: 43420 - RNA, 18 nt, Homo sapiens
cuauuacgugcaauacuu

SEQ ID NO: 43421 - RNA, 23 nt, Homo sapiens
cuauuauagaauggaacucaagg

SEQ ID NO: 43422 - RNA, 13 nt, Homo sapiens
cuauuauauucau

SEQ ID NO: 43423 - RNA, 14 nt, Homo sapiens
cuauuauauucauu

SEQ ID NO: 43424 - RNA, 15 nt, Homo sapiens
cuauuauauucauuc

SEQ ID NO: 43425 - RNA, 18 nt, Homo sapiens
cuauuauauucauucuuu

SEQ ID NO: 43426 - RNA, 17 nt, Homo sapiens
cuauucaaacagucuca

SEQ ID NO: 43427 - RNA, 21 nt, Homo sapiens
cuauugugcuuucuaucuaau

SEQ ID NO: 43428 - RNA, 16 nt, Homo sapiens
cuauuuaaagacaaag

SEQ ID NO: 43429 - RNA, 22 nt, Homo sapiens
cuauuuaauuauuucacuuuag

SEQ ID NO: 43430 - RNA, 20 nt, Homo sapiens
cuauuuauugcugaaugacu

SEQ ID NO: 43431 - RNA, 21 nt, Homo sapiens
cuauuuauugcugaaugacua

SEQ ID NO: 43432 - RNA, 22 nt, Homo sapiens
cuauuuauugcugaaugacuac

SEQ ID NO: 43433 - RNA, 19 nt, Homo sapiens
cuauuuuuuuucuguuaua

SEQ ID NO: 43434 - RNA, 18 nt, Homo sapiens
cucaaaacugcacuguca

SEQ ID NO: 43435 - RNA, 18 nt, Homo sapiens
cucaaaauaccaugccau

SEQ ID NO: 43436 - RNA, 11 nt, Homo sapiens
cucaagccagc

SEQ ID NO: 43437 - RNA, 15 nt, Homo sapiens
cucacaagcacuuuc

SEQ ID NO: 43438 - RNA, 16 nt, Homo sapiens
cucacaagcacuuucc

SEQ ID NO: 43439 - RNA, 17 nt, Homo sapiens
cucaccucucaccuccc

SEQ ID NO: 43440 - RNA, 14 nt, Homo sapiens
cucagaaacaucag

SEQ ID NO: 43441 - RNA, 17 nt, Homo sapiens
cucagaaacaucaguua

SEQ ID NO: 43442 - RNA, 13 nt, Homo sapiens
cucagaaggcaaa

SEQ ID NO: 43443 - RNA, 13 nt, Homo sapiens
cucaggcuggcac

SEQ ID NO: 43444 - RNA, 15 nt, Homo sapiens
cucaggcuggcaccg

SEQ ID NO: 43445 - RNA, 16 nt, Homo sapiens
cucaggcuggcaccgc

SEQ ID NO: 43446 - RNA, 20 nt, Homo sapiens
cucaggcuggcaccgcugua

SEQ ID NO: 43447 - RNA, 21 nt, Homo sapiens
cucaggcuggcaccgcuguac

SEQ ID NO: 43448 - RNA, 22 nt, Homo sapiens
cucaggcuggcaccgcuguacg

SEQ ID NO: 43449 - RNA, 23 nt, Homo sapiens
cucaggcuggcaccgcuguacgc

SEQ ID NO: 43450 - RNA, 20 nt, Homo sapiens
cucaggggccaacuaggcag

SEQ ID NO: 43451 - RNA, 19 nt, Homo sapiens
cucagugucaaugcagccc

SEQ ID NO: 43452 - RNA, 20 nt, Homo sapiens
cucagugucaaugcagcccc

SEQ ID NO: 43453 - RNA, 15 nt, Homo sapiens
cucaguguccucauc

SEQ ID NO: 43454 - RNA, 21 nt, Homo sapiens
cucaguugcagcccugcugcu

SEQ ID NO: 43455 - RNA, 15 nt, Homo sapiens
cucauccacuuucca

SEQ ID NO: 43456 - RNA, 15 nt, Homo sapiens
cucaucccacccgcc

SEQ ID NO: 43457 - RNA, 13 nt, Homo sapiens
cucaucugugauu

SEQ ID NO: 43458 - RNA, 11 nt, Homo sapiens
cucaugcugcc

SEQ ID NO: 43459 - RNA, 14 nt, Homo sapiens
cucauggaauugga

SEQ ID NO: 43460 - RNA, 22 nt, Homo sapiens
cucauggaauuggagcucgugg

SEQ ID NO: 43461 - RNA, 23 nt, Homo sapiens
cucauggaauuggagcucguggg

SEQ ID NO: 43462 - RNA, 20 nt, Homo sapiens
cucaugggggugacaagcuu

SEQ ID NO: 43463 - RNA, 18 nt, Homo sapiens
cucauuccccaaccacuu

SEQ ID NO: 43464 - RNA, 18 nt, Homo sapiens
cucauugcaaccuccacc

SEQ ID NO: 43465 - RNA, 19 nt, Homo sapiens
cucauugcaaccuccaccu

SEQ ID NO: 43466 - RNA, 19 nt, Homo sapiens
cucauuuauuuccauauua

SEQ ID NO: 43467 - RNA, 15 nt, Homo sapiens
cucauuuccaagcaa

SEQ ID NO: 43468 - RNA, 22 nt, Homo sapiens
cucauuuccuauguaacugcau

SEQ ID NO: 43469 - RNA, 23 nt, Homo sapiens
cucauuuccuauguaacugcauu

SEQ ID NO: 43470 - RNA, 21 nt, Homo sapiens
cucauuuuuguuuucauuauc

SEQ ID NO: 43471 - RNA, 23 nt, Homo sapiens
cucauuuuuguuuucauuaucuc

SEQ ID NO: 43472 - RNA, 17 nt, Homo sapiens
cuccaaaaucggaucug

SEQ ID NO: 43473 - RNA, 22 nt, Homo sapiens
cuccaaaccacuuuuugcagcu

SEQ ID NO: 43474 - RNA, 16 nt, Homo sapiens
cuccaauuaaggauuu

SEQ ID NO: 43475 - RNA, 13 nt, Homo sapiens
cuccacauccugu

SEQ ID NO: 43476 - RNA, 15 nt, Homo sapiens
cuccaccuucugggu

SEQ ID NO: 43477 - RNA, 14 nt, Homo sapiens
cuccagccugagcg

SEQ ID NO: 43478 - RNA, 11 nt, Homo sapiens
cuccagccugg

SEQ ID NO: 43479 - RNA, 12 nt, Homo sapiens
cuccagccuggg

SEQ ID NO: 43480 - RNA, 16 nt, Homo sapiens
cuccagccugggugac

SEQ ID NO: 43481 - RNA, 17 nt, Homo sapiens
cuccagccugggugaca

SEQ ID NO: 43482 - RNA, 14 nt, Homo sapiens
cuccagcugccccg

SEQ ID NO: 43483 - RNA, 15 nt, Homo sapiens
cuccagcugccccgg

SEQ ID NO: 43484 - RNA, 18 nt, Homo sapiens
cuccagcugccccgggga

SEQ ID NO: 43485 - RNA, 21 nt, Homo sapiens
cuccaugaauaucaguuauuu

SEQ ID NO: 43486 - RNA, 17 nt, Homo sapiens
cuccaugaucccaccuc

SEQ ID NO: 43487 - RNA, 13 nt, Homo sapiens
cuccauggcccug

SEQ ID NO: 43488 - RNA, 14 nt, Homo sapiens
cuccauggcccugc

SEQ ID NO: 43489 - RNA, 15 nt, Homo sapiens
cucccaacgucccua

SEQ ID NO: 43490 - RNA, 17 nt, Homo sapiens
cucccaacuauaaaacu

SEQ ID NO: 43491 - RNA, 23 nt, Homo sapiens
cucccauucacagauaccucucu

SEQ ID NO: 43492 - RNA, 11 nt, Homo sapiens
cucccauucag

SEQ ID NO: 43493 - RNA, 12 nt, Homo sapiens
cucccauucagg

SEQ ID NO: 43494 - RNA, 12 nt, Homo sapiens
cucccggccgcg

SEQ ID NO: 43495 - RNA, 13 nt, Homo sapiens
cucccggccgcgc

SEQ ID NO: 43496 - RNA, 17 nt, Homo sapiens
cucccggccgcgcugcg

SEQ ID NO: 43497 - RNA, 18 nt, Homo sapiens
cucccggccgcgcugcgc

SEQ ID NO: 43498 - RNA, 19 nt, Homo sapiens
cucccggccgcgcugcgcg

SEQ ID NO: 43499 - RNA, 20 nt, Homo sapiens
cucccggccgcgcugcgcgc

SEQ ID NO: 43500 - RNA, 23 nt, Homo sapiens
cucccggccgcgcugcgcgccgc

SEQ ID NO: 43501 - RNA, 12 nt, Homo sapiens
cuccgcgcagcu

SEQ ID NO: 43502 - RNA, 14 nt, Homo sapiens
cuccgcgcagcuca

SEQ ID NO: 43503 - RNA, 20 nt, Homo sapiens
cuccgcgcagcucaggcugg

SEQ ID NO: 43504 - RNA, 17 nt, Homo sapiens
cuccgcuacuuccaggg

SEQ ID NO: 43505 - RNA, 21 nt, Homo sapiens
cuccgcuacuuccagggcuac

SEQ ID NO: 43506 - RNA, 13 nt, Homo sapiens
cuccggacgcugc

SEQ ID NO: 43507 - RNA, 15 nt, Homo sapiens
cuccggacgcugcug

SEQ ID NO: 43508 - RNA, 17 nt, Homo sapiens
cuccggacgcugcugcc

SEQ ID NO: 43509 - RNA, 19 nt, Homo sapiens
cuccggacgcugcugccgu

SEQ ID NO: 43510 - RNA, 20 nt, Homo sapiens
cuccggacgcugcugccgug

SEQ ID NO: 43511 - RNA, 22 nt, Homo sapiens
cuccugagacacaugggugcua

SEQ ID NO: 43512 - RNA, 20 nt, Homo sapiens
cuccugccuaagugcagccc

SEQ ID NO: 43513 - RNA, 21 nt, Homo sapiens
cuccugccuaagugcagcccc

SEQ ID NO: 43514 - RNA, 15 nt, Homo sapiens
cuccugcuacucugu

SEQ ID NO: 43515 - RNA, 23 nt, Homo sapiens
cuccuucauggcaggcaucgcca

SEQ ID NO: 43516 - RNA, 13 nt, Homo sapiens
cuccuuguguuac

SEQ ID NO: 43517 - RNA, 13 nt, Homo sapiens
cucgaacugcugg

SEQ ID NO: 43518 - RNA, 20 nt, Homo sapiens
cucgaacugcuggauucaag

SEQ ID NO: 43519 - RNA, 18 nt, Homo sapiens
cucgaggcccuagcauuu

SEQ ID NO: 43520 - RNA, 12 nt, Homo sapiens
cucgccacgcuc

SEQ ID NO: 43521 - RNA, 13 nt, Homo sapiens
cucgccacgcucu

SEQ ID NO: 43522 - RNA, 15 nt, Homo sapiens
cucgccacgcucugg

SEQ ID NO: 43523 - RNA, 19 nt, Homo sapiens
cucgccacgcucugggucg

SEQ ID NO: 43524 - RNA, 22 nt, Homo sapiens
cucgccacgcucugggucgccg

SEQ ID NO: 43525 - RNA, 20 nt, Homo sapiens
cucgcccacuuccucccggc

SEQ ID NO: 43526 - RNA, 21 nt, Homo sapiens
cucgcccacuuccucccggcc

SEQ ID NO: 43527 - RNA, 22 nt, Homo sapiens
cucgcccacuuccucccggccg

SEQ ID NO: 43528 - RNA, 12 nt, Homo sapiens
cucgcuuccgca

SEQ ID NO: 43529 - RNA, 14 nt, Homo sapiens
cucgcuuccgcauc

SEQ ID NO: 43530 - RNA, 20 nt, Homo sapiens
cucgcuuccgcauccuaguc

SEQ ID NO: 43531 - RNA, 21 nt, Homo sapiens
cucggagaagagcuguucaca

SEQ ID NO: 43532 - RNA, 14 nt, Homo sapiens
cucggccugcucgc

SEQ ID NO: 43533 - RNA, 17 nt, Homo sapiens
cucggccugcucgccca

SEQ ID NO: 43534 - RNA, 18 nt, Homo sapiens
cucggccugcucgcccac

SEQ ID NO: 43535 - RNA, 13 nt, Homo sapiens
cucgugggacagu

SEQ ID NO: 43536 - RNA, 14 nt, Homo sapiens
cucgugggacaguc

SEQ ID NO: 43537 - RNA, 19 nt, Homo sapiens
cucgugguaggacuguaga

SEQ ID NO: 43538 - RNA, 20 nt, Homo sapiens
cucgugguaggacuguagaa

SEQ ID NO: 43539 - RNA, 20 nt, Homo sapiens
cucuaacucagaaacaucag

SEQ ID NO: 43540 - RNA, 17 nt, Homo sapiens
cucuaccugcacacugu

SEQ ID NO: 43541 - RNA, 17 nt, Homo sapiens
cucuaggaaauauuuau

SEQ ID NO: 43542 - RNA, 18 nt, Homo sapiens
cucuaggaaauauuuauu

SEQ ID NO: 43543 - RNA, 21 nt, Homo sapiens
cucuaggaaauauuuauuuua

SEQ ID NO: 43544 - RNA, 21 nt, Homo sapiens
cucuauagacucuaggacaua

SEQ ID NO: 43545 - RNA, 22 nt, Homo sapiens
cucuaucauuaaaguucuagug

SEQ ID NO: 43546 - RNA, 17 nt, Homo sapiens
cucuaucccaaccucuc

SEQ ID NO: 43547 - RNA, 12 nt, Homo sapiens
cucuauugccau

SEQ ID NO: 43548 - RNA, 20 nt, Homo sapiens
cucucaguugcagcccugcu

SEQ ID NO: 43549 - RNA, 14 nt, Homo sapiens
cucucucauccacu

SEQ ID NO: 43550 - RNA, 13 nt, Homo sapiens
cucucuuccuccc

SEQ ID NO: 43551 - RNA, 14 nt, Homo sapiens
cucucuuccucccu

SEQ ID NO: 43552 - RNA, 14 nt, Homo sapiens
cucugaaggguaau

SEQ ID NO: 43553 - RNA, 12 nt, Homo sapiens
cucugauaccuc

SEQ ID NO: 43554 - RNA, 21 nt, Homo sapiens
cucugcccauccugccccuga

SEQ ID NO: 43555 - RNA, 14 nt, Homo sapiens
cucuggaagccucu

SEQ ID NO: 43556 - RNA, 21 nt, Homo sapiens
cucuggaagccucuauugcca

SEQ ID NO: 43557 - RNA, 15 nt, Homo sapiens
cucuggcgacaguuu

SEQ ID NO: 43558 - RNA, 23 nt, Homo sapiens
cucuggcgacaguuuuccuucuc

SEQ ID NO: 43559 - RNA, 12 nt, Homo sapiens
cucuggcugcug

SEQ ID NO: 43560 - RNA, 13 nt, Homo sapiens
cucuggcugcugg

SEQ ID NO: 43561 - RNA, 20 nt, Homo sapiens
cucuggcugcugguggcgcu

SEQ ID NO: 43562 - RNA, 22 nt, Homo sapiens
cucuggcugcugguggcgcugg

SEQ ID NO: 43563 - RNA, 16 nt, Homo sapiens
cucugggucgccggca

SEQ ID NO: 43564 - RNA, 18 nt, Homo sapiens
cucugggucgccggcauc

SEQ ID NO: 43565 - RNA, 18 nt, Homo sapiens
cucugggucucagugucc

SEQ ID NO: 43566 - RNA, 13 nt, Homo sapiens
cucugucucaguc

SEQ ID NO: 43567 - RNA, 14 nt, Homo sapiens
cucuucacagucac

SEQ ID NO: 43568 - RNA, 13 nt, Homo sapiens
cucuucugacacu

SEQ ID NO: 43569 - RNA, 14 nt, Homo sapiens
cucuucugacacua

SEQ ID NO: 43570 - RNA, 12 nt, Homo sapiens
cucuugcaauuc

SEQ ID NO: 43571 - RNA, 13 nt, Homo sapiens
cucuuggugccuc

SEQ ID NO: 43572 - RNA, 15 nt, Homo sapiens
cucuuguagcucucu

SEQ ID NO: 43573 - RNA, 22 nt, Homo sapiens
cucuuguagcucucugaccucc

SEQ ID NO: 43574 - RNA, 21 nt, Homo sapiens
cugaaaccccagggcuugugu

SEQ ID NO: 43575 - RNA, 18 nt, Homo sapiens
cugaaagaggaaugaagu

SEQ ID NO: 43576 - RNA, 13 nt, Homo sapiens
cugaacacuccaa

SEQ ID NO: 43577 - RNA, 22 nt, Homo sapiens
cugaaccguuugugauugccau

SEQ ID NO: 43578 - RNA, 21 nt, Homo sapiens
cugaagaagaugguaccacca

SEQ ID NO: 43579 - RNA, 13 nt, Homo sapiens
cugaauacauucu

SEQ ID NO: 43580 - RNA, 20 nt, Homo sapiens
cugaauacauucugcuuuca

SEQ ID NO: 43581 - RNA, 17 nt, Homo sapiens
cugaauuuaaauagcuu

SEQ ID NO: 43582 - RNA, 11 nt, Homo sapiens
cugaauuucuu

SEQ ID NO: 43583 - RNA, 15 nt, Homo sapiens
cugacacuaaaacac

SEQ ID NO: 43584 - RNA, 18 nt, Homo sapiens
cugacacuaaaacaccuc

SEQ ID NO: 43585 - RNA, 18 nt, Homo sapiens
cugacagcccaagggugg

SEQ ID NO: 43586 - RNA, 15 nt, Homo sapiens
cugaccaauauugua

SEQ ID NO: 43587 - RNA, 20 nt, Homo sapiens
cugaccaauauuguacaguu

SEQ ID NO: 43588 - RNA, 21 nt, Homo sapiens
cugaccaauauuguacaguuu

SEQ ID NO: 43589 - RNA, 15 nt, Homo sapiens
cugacccagccccuu

SEQ ID NO: 43590 - RNA, 16 nt, Homo sapiens
cugacccagccccuug

SEQ ID NO: 43591 - RNA, 16 nt, Homo sapiens
cugaccuccuccuuca

SEQ ID NO: 43592 - RNA, 17 nt, Homo sapiens
cugaccuccuccuucau

SEQ ID NO: 43593 - RNA, 16 nt, Homo sapiens
cugacuaauuaggcaa

SEQ ID NO: 43594 - RNA, 11 nt, Homo sapiens
cugacugcuag

SEQ ID NO: 43595 - RNA, 18 nt, Homo sapiens
cugagaaagacuauucaa

SEQ ID NO: 43596 - RNA, 15 nt, Homo sapiens
cugagacacaugggu

SEQ ID NO: 43597 - RNA, 19 nt, Homo sapiens
cugagacacaugggugcua

SEQ ID NO: 43598 - RNA, 18 nt, Homo sapiens
cugagaccaaggcccccg

SEQ ID NO: 43599 - RNA, 19 nt, Homo sapiens
cugagaccaaggcccccgg

SEQ ID NO: 43600 - RNA, 23 nt, Homo sapiens
cugagaccaaggcccccgggccg

SEQ ID NO: 43601 - RNA, 12 nt, Homo sapiens
cugagaccagcc

SEQ ID NO: 43602 - RNA, 13 nt, Homo sapiens
cugagaccagcca

SEQ ID NO: 43603 - RNA, 14 nt, Homo sapiens
cugagaccagccaa

SEQ ID NO: 43604 - RNA, 15 nt, Homo sapiens
cugagaccagccaac

SEQ ID NO: 43605 - RNA, 18 nt, Homo sapiens
cugagaccagccaaccug

SEQ ID NO: 43606 - RNA, 15 nt, Homo sapiens
cugagagugaacaaa

SEQ ID NO: 43607 - RNA, 13 nt, Homo sapiens
cugagcaggauuu

SEQ ID NO: 43608 - RNA, 19 nt, Homo sapiens
cugagcagucagaagaccu

SEQ ID NO: 43609 - RNA, 18 nt, Homo sapiens
cugagcccggaaacucca

SEQ ID NO: 43610 - RNA, 19 nt, Homo sapiens
cugaggagccugcaacaug

SEQ ID NO: 43611 - RNA, 22 nt, Homo sapiens
cugaggagccugcaacaugcca

SEQ ID NO: 43612 - RNA, 19 nt, Homo sapiens
cugaguacguugugcauuu

SEQ ID NO: 43613 - RNA, 12 nt, Homo sapiens
cugauaccucaa

SEQ ID NO: 43614 - RNA, 23 nt, Homo sapiens
cugauauauguguuuuucacauu

SEQ ID NO: 43615 - RNA, 18 nt, Homo sapiens
cugauaugggucuugaua

SEQ ID NO: 43616 - RNA, 21 nt, Homo sapiens
cugauaugggucuugauaaau

SEQ ID NO: 43617 - RNA, 22 nt, Homo sapiens
cugauaugggucuugauaaaug

SEQ ID NO: 43618 - RNA, 22 nt, Homo sapiens
cugaugaaaacauagcaucuca

SEQ ID NO: 43619 - RNA, 13 nt, Homo sapiens
cugauuaaaccaa

SEQ ID NO: 43620 - RNA, 17 nt, Homo sapiens
cugcaacuacuauccaa

SEQ ID NO: 43621 - RNA, 22 nt, Homo sapiens
cugcaagcuuuucaaaauugga

SEQ ID NO: 43622 - RNA, 21 nt, Homo sapiens
cugcaaucugagccagugcuu

SEQ ID NO: 43623 - RNA, 21 nt, Homo sapiens
cugcacacuguccuauuauau

SEQ ID NO: 43624 - RNA, 18 nt, Homo sapiens
cugcacugucaagaugau

SEQ ID NO: 43625 - RNA, 20 nt, Homo sapiens
cugcagaagacaguauggca

SEQ ID NO: 43626 - RNA, 12 nt, Homo sapiens
cugcaucagcug

SEQ ID NO: 43627 - RNA, 20 nt, Homo sapiens
cugcauugagaacugcauau

SEQ ID NO: 43628 - RNA, 16 nt, Homo sapiens
cugccaauauccuaau

SEQ ID NO: 43629 - RNA, 20 nt, Homo sapiens
cugccaucauuuacuuuuaa

SEQ ID NO: 43630 - RNA, 16 nt, Homo sapiens
cugccccggggagggg

SEQ ID NO: 43631 - RNA, 20 nt, Homo sapiens
cugccccggggaggggcgcu

SEQ ID NO: 43632 - RNA, 12 nt, Homo sapiens
cugccccugagc

SEQ ID NO: 43633 - RNA, 14 nt, Homo sapiens
cugccccugagccc

SEQ ID NO: 43634 - RNA, 15 nt, Homo sapiens
cugccccugagccca

SEQ ID NO: 43635 - RNA, 19 nt, Homo sapiens
cugcccugaaagucccaga

SEQ ID NO: 43636 - RNA, 15 nt, Homo sapiens
cugccgugggccuga

SEQ ID NO: 43637 - RNA, 17 nt, Homo sapiens
cugccgugggccugaga

SEQ ID NO: 43638 - RNA, 18 nt, Homo sapiens
cugccgugggccugagac

SEQ ID NO: 43639 - RNA, 18 nt, Homo sapiens
cugccuaagugcagcccc

SEQ ID NO: 43640 - RNA, 20 nt, Homo sapiens
cugccucagguguccgcuau

SEQ ID NO: 43641 - RNA, 23 nt, Homo sapiens
cugccucagguguccgcuaucca

SEQ ID NO: 43642 - RNA, 18 nt, Homo sapiens
cugccucuaaaaggccug

SEQ ID NO: 43643 - RNA, 23 nt, Homo sapiens
cugccucucucauccacuuucca

SEQ ID NO: 43644 - RNA, 21 nt, Homo sapiens
cugccuggacuuggccccugc

SEQ ID NO: 43645 - RNA, 20 nt, Homo sapiens
cugccuuguuuaauguuaau

SEQ ID NO: 43646 - RNA, 13 nt, Homo sapiens
cugcgcgccgcgc

SEQ ID NO: 43647 - RNA, 15 nt, Homo sapiens
cugcgcgccgcgcuc

SEQ ID NO: 43648 - RNA, 17 nt, Homo sapiens
cugcgcgccgcgcuccu

SEQ ID NO: 43649 - RNA, 18 nt, Homo sapiens
cugcgcgccgcgcuccuc

SEQ ID NO: 43650 - RNA, 19 nt, Homo sapiens
cugcuaguuuauauagaaa

SEQ ID NO: 43651 - RNA, 20 nt, Homo sapiens
cugcucgcccacuuccuccc

SEQ ID NO: 43652 - RNA, 22 nt, Homo sapiens
cugcucgcccacuuccucccgg

SEQ ID NO: 43653 - RNA, 23 nt, Homo sapiens
cugcucgcccacuuccucccggc

SEQ ID NO: 43654 - RNA, 18 nt, Homo sapiens
cugcugaaacaacaaaua

SEQ ID NO: 43655 - RNA, 15 nt, Homo sapiens
cugcugcccuucccc

SEQ ID NO: 43656 - RNA, 17 nt, Homo sapiens
cugcugccgugggccug

SEQ ID NO: 43657 - RNA, 19 nt, Homo sapiens
cugcugccgugggccugag

SEQ ID NO: 43658 - RNA, 21 nt, Homo sapiens
cugcugccugccuggacuugg

SEQ ID NO: 43659 - RNA, 10 nt, Homo sapiens
cugcugcugc

SEQ ID NO: 43660 - RNA, 20 nt, Homo sapiens
cugcuggauguggagggggc

SEQ ID NO: 43661 - RNA, 18 nt, Homo sapiens
cugcuggauucaagugau

SEQ ID NO: 43662 - RNA, 14 nt, Homo sapiens
cugcugguggcgcu

SEQ ID NO: 43663 - RNA, 15 nt, Homo sapiens
cugcugguggcgcug

SEQ ID NO: 43664 - RNA, 17 nt, Homo sapiens
cugcugguggcgcuggc

SEQ ID NO: 43665 - RNA, 21 nt, Homo sapiens
cugcugguggcgcuggcugcg

SEQ ID NO: 43666 - RNA, 22 nt, Homo sapiens
cugcugguggcgcuggcugcgc

SEQ ID NO: 43667 - RNA, 15 nt, Homo sapiens
cugcuuuaauuucau

SEQ ID NO: 43668 - RNA, 16 nt, Homo sapiens
cuggaaaccacauggc

SEQ ID NO: 43669 - RNA, 17 nt, Homo sapiens
cuggaaaccacauggcu

SEQ ID NO: 43670 - RNA, 21 nt, Homo sapiens
cuggaaaccacauggcuucac

SEQ ID NO: 43671 - RNA, 11 nt, Homo sapiens
cuggaaacuuc

SEQ ID NO: 43672 - RNA, 20 nt, Homo sapiens
cuggaagccucuauugccau

SEQ ID NO: 43673 - RNA, 11 nt, Homo sapiens
cuggacuuggc

SEQ ID NO: 43674 - RNA, 12 nt, Homo sapiens
cuggacuuggcc

SEQ ID NO: 43675 - RNA, 22 nt, Homo sapiens
cuggacuuuccagagaccagua

SEQ ID NO: 43676 - RNA, 13 nt, Homo sapiens
cuggagcucugcc

SEQ ID NO: 43677 - RNA, 22 nt, Homo sapiens
cuggagcuugaaauagugucug

SEQ ID NO: 43678 - RNA, 19 nt, Homo sapiens
cuggagugcaguggcgcaa

SEQ ID NO: 43679 - RNA, 20 nt, Homo sapiens
cuggauguggagggggcgcg

SEQ ID NO: 43680 - RNA, 21 nt, Homo sapiens
cuggauguggagggggcgcgu

SEQ ID NO: 43681 - RNA, 22 nt, Homo sapiens
cuggauguggagggggcgcgug

SEQ ID NO: 43682 - RNA, 22 nt, Homo sapiens
cuggauucaagugauccgccca

SEQ ID NO: 43683 - RNA, 15 nt, Homo sapiens
cuggauuugcaaccc

SEQ ID NO: 43684 - RNA, 16 nt, Homo sapiens
cuggauuugcaacccc

SEQ ID NO: 43685 - RNA, 20 nt, Homo sapiens
cuggauuugcaaccccauca

SEQ ID NO: 43686 - RNA, 12 nt, Homo sapiens
cuggcaccgcug

SEQ ID NO: 43687 - RNA, 13 nt, Homo sapiens
cuggccaggcugg

SEQ ID NO: 43688 - RNA, 17 nt, Homo sapiens
cuggccaggcuggucuc

SEQ ID NO: 43689 - RNA, 12 nt, Homo sapiens
cuggccugcugg

SEQ ID NO: 43690 - RNA, 16 nt, Homo sapiens
cuggccugcuggaugu

SEQ ID NO: 43691 - RNA, 22 nt, Homo sapiens
cuggcgacaguuuuccuucuca

SEQ ID NO: 43692 - RNA, 17 nt, Homo sapiens
cuggcguuguggggaug

SEQ ID NO: 43693 - RNA, 16 nt, Homo sapiens
cuggcuaugcauuuga

SEQ ID NO: 43694 - RNA, 13 nt, Homo sapiens
cuggcugcgcucg

SEQ ID NO: 43695 - RNA, 14 nt, Homo sapiens
cuggcugcgcucgg

SEQ ID NO: 43696 - RNA, 16 nt, Homo sapiens
cuggcugcgcucggcc

SEQ ID NO: 43697 - RNA, 17 nt, Homo sapiens
cuggcugcgcucggccu

SEQ ID NO: 43698 - RNA, 18 nt, Homo sapiens
cuggcugcgcucggccug

SEQ ID NO: 43699 - RNA, 19 nt, Homo sapiens
cuggcugcgcucggccugc

SEQ ID NO: 43700 - RNA, 20 nt, Homo sapiens
cuggcugcgcucggccugcu

SEQ ID NO: 43701 - RNA, 21 nt, Homo sapiens
cuggcugcgcucggccugcuc

SEQ ID NO: 43702 - RNA, 11 nt, Homo sapiens
cuggcugcugg

SEQ ID NO: 43703 - RNA, 15 nt, Homo sapiens
cuggcugcugguggc

SEQ ID NO: 43704 - RNA, 17 nt, Homo sapiens
cuggcugcugguggcgc

SEQ ID NO: 43705 - RNA, 19 nt, Homo sapiens
cuggcugcugguggcgcug

SEQ ID NO: 43706 - RNA, 21 nt, Homo sapiens
cuggcugcugguggcgcuggc

SEQ ID NO: 43707 - RNA, 22 nt, Homo sapiens
cuggcugcugguggcgcuggcu

SEQ ID NO: 43708 - RNA, 24 nt, Homo sapiens
cuggcugcugguggcgcuggcugc

SEQ ID NO: 43709 - RNA, 16 nt, Homo sapiens
cuggcugggaguggca

SEQ ID NO: 43710 - RNA, 16 nt, Homo sapiens
cuggcuggggccuguu

SEQ ID NO: 43711 - RNA, 18 nt, Homo sapiens
cuggcuggggccuguuga

SEQ ID NO: 43712 - RNA, 18 nt, Homo sapiens
cuggcuuaaaauguaauu

SEQ ID NO: 43713 - RNA, 21 nt, Homo sapiens
cugggaccaggcacccccaga

SEQ ID NO: 43714 - RNA, 18 nt, Homo sapiens
cugggcaagggaccugcu

SEQ ID NO: 43715 - RNA, 21 nt, Homo sapiens
cugggcaagggaccugcuucu

SEQ ID NO: 43716 - RNA, 16 nt, Homo sapiens
cugggccauagucauu

SEQ ID NO: 43717 - RNA, 17 nt, Homo sapiens
cugggcugaacacucca

SEQ ID NO: 43718 - RNA, 15 nt, Homo sapiens
cuggggccuguugaa

SEQ ID NO: 43719 - RNA, 18 nt, Homo sapiens
cugggguggguggggcag

SEQ ID NO: 43720 - RNA, 19 nt, Homo sapiens
cugggguggguggggcagu

SEQ ID NO: 43721 - RNA, 20 nt, Homo sapiens
cugggguggguggggcagug

SEQ ID NO: 43722 - RNA, 15 nt, Homo sapiens
cugggucgccggcau

SEQ ID NO: 43723 - RNA, 16 nt, Homo sapiens
cugggucgccggcauc

SEQ ID NO: 43724 - RNA, 14 nt, Homo sapiens
cuggguuccugcaa

SEQ ID NO: 43725 - RNA, 20 nt, Homo sapiens
cugguccuaagucccugcug

SEQ ID NO: 43726 - RNA, 22 nt, Homo sapiens
cugguccuaagucccugcugcc

SEQ ID NO: 43727 - RNA, 16 nt, Homo sapiens
cuggucuaccuguucg

SEQ ID NO: 43728 - RNA, 18 nt, Homo sapiens
cuggucuaccuguucgcg

SEQ ID NO: 43729 - RNA, 21 nt, Homo sapiens
cuggucuaccuguucgcgcgc

SEQ ID NO: 43730 - RNA, 14 nt, Homo sapiens
cuggucucgaacug

SEQ ID NO: 43731 - RNA, 15 nt, Homo sapiens
cuggucucgaacugc

SEQ ID NO: 43732 - RNA, 19 nt, Homo sapiens
cuggucucgaacugcugga

SEQ ID NO: 43733 - RNA, 20 nt, Homo sapiens
cuggucucgaacugcuggau

SEQ ID NO: 43734 - RNA, 17 nt, Homo sapiens
cuggugccucaccccuu

SEQ ID NO: 43735 - RNA, 13 nt, Homo sapiens
cugguggcgcugg

SEQ ID NO: 43736 - RNA, 15 nt, Homo sapiens
cugguggcgcuggcu

SEQ ID NO: 43737 - RNA, 20 nt, Homo sapiens
cugguggcgcuggcugcgcu

SEQ ID NO: 43738 - RNA, 21 nt, Homo sapiens
cugguggcgcuggcugcgcuc

SEQ ID NO: 43739 - RNA, 21 nt, Homo sapiens
cuguaaaauggagacaccacc

SEQ ID NO: 43740 - RNA, 23 nt, Homo sapiens
cuguaaaauggagacaccaccac

SEQ ID NO: 43741 - RNA, 14 nt, Homo sapiens
cuguaaucacagcu

SEQ ID NO: 43742 - RNA, 21 nt, Homo sapiens
cuguaaucacagcuacuuggg

SEQ ID NO: 43743 - RNA, 23 nt, Homo sapiens
cuguaaucccagcacuuugggag

SEQ ID NO: 43744 - RNA, 12 nt, Homo sapiens
cuguacgcgagc

SEQ ID NO: 43745 - RNA, 14 nt, Homo sapiens
cuguacgcgagcgc

SEQ ID NO: 43746 - RNA, 18 nt, Homo sapiens
cuguacgcgagcgcgcgc

SEQ ID NO: 43747 - RNA, 19 nt, Homo sapiens
cuguacgcgagcgcgcgcg

SEQ ID NO: 43748 - RNA, 21 nt, Homo sapiens
cuguacgcgagcgcgcgcgcc

SEQ ID NO: 43749 - RNA, 22 nt, Homo sapiens
cuguacgcgagcgcgcgcgccc

SEQ ID NO: 43750 - RNA, 22 nt, Homo sapiens
cuguacuccagccugggugaca

SEQ ID NO: 43751 - RNA, 14 nt, Homo sapiens
cuguaucaugacaa

SEQ ID NO: 43752 - RNA, 17 nt, Homo sapiens
cuguaugucucguggua

SEQ ID NO: 43753 - RNA, 20 nt, Homo sapiens
cuguauuuuaaaagaaugau

SEQ ID NO: 43754 - RNA, 21 nt, Homo sapiens
cuguauuuuaaaagaaugauu

SEQ ID NO: 43755 - RNA, 17 nt, Homo sapiens
cugucacggucacuuua

SEQ ID NO: 43756 - RNA, 18 nt, Homo sapiens
cugucacgugugggcaau

SEQ ID NO: 43757 - RNA, 15 nt, Homo sapiens
cugucccagcgaggg

SEQ ID NO: 43758 - RNA, 20 nt, Homo sapiens
cuguccccgaaacuaccagc

SEQ ID NO: 43759 - RNA, 21 nt, Homo sapiens
cuguccccgaaacuaccagcc

SEQ ID NO: 43760 - RNA, 22 nt, Homo sapiens
cuguccccgaaacuaccagccc

SEQ ID NO: 43761 - RNA, 19 nt, Homo sapiens
cugucccugcagacaugag

SEQ ID NO: 43762 - RNA, 20 nt, Homo sapiens
cugucccugcagacaugaga

SEQ ID NO: 43763 - RNA, 16 nt, Homo sapiens
cugucuggacuuucca

SEQ ID NO: 43764 - RNA, 20 nt, Homo sapiens
cugucuggacuuuccagaga

SEQ ID NO: 43765 - RNA, 15 nt, Homo sapiens
cugugaaauaguuca

SEQ ID NO: 43766 - RNA, 21 nt, Homo sapiens
cugugagaccaaauugagcua

SEQ ID NO: 43767 - RNA, 21 nt, Homo sapiens
cugugauucccuccugcuacu

SEQ ID NO: 43768 - RNA, 12 nt, Homo sapiens
cugugcggccug

SEQ ID NO: 43769 - RNA, 21 nt, Homo sapiens
cugugucucaggugugcccug

SEQ ID NO: 43770 - RNA, 17 nt, Homo sapiens
cuguguuagagcagaga

SEQ ID NO: 43771 - RNA, 15 nt, Homo sapiens
cuguuaaaagaugaa

SEQ ID NO: 43772 - RNA, 16 nt, Homo sapiens
cuguuaucuucacuuu

SEQ ID NO: 43773 - RNA, 18 nt, Homo sapiens
cuguuaucuucacuuuua

SEQ ID NO: 43774 - RNA, 19 nt, Homo sapiens
cuguuauuuuaucugcuau

SEQ ID NO: 43775 - RNA, 13 nt, Homo sapiens
cuguucacagcca

SEQ ID NO: 43776 - RNA, 13 nt, Homo sapiens
cuguuccucgcca

SEQ ID NO: 43777 - RNA, 18 nt, Homo sapiens
cuguuccuucacauccug

SEQ ID NO: 43778 - RNA, 14 nt, Homo sapiens
cuguucgcgcgccu

SEQ ID NO: 43779 - RNA, 18 nt, Homo sapiens
cuguucgcgcgccuccgc

SEQ ID NO: 43780 - RNA, 19 nt, Homo sapiens
cuguucgcgcgccuccgcu

SEQ ID NO: 43781 - RNA, 15 nt, Homo sapiens
cuguucuuuccaaag

SEQ ID NO: 43782 - RNA, 14 nt, Homo sapiens
cuguucuuucuggc

SEQ ID NO: 43783 - RNA, 19 nt, Homo sapiens
cuguuuagaugaaugucag

SEQ ID NO: 43784 - RNA, 17 nt, Homo sapiens
cuguuuuaugacuucau

SEQ ID NO: 43785 - RNA, 14 nt, Homo sapiens
cuuaaaaucuaauu

SEQ ID NO: 43786 - RNA, 13 nt, Homo sapiens
cuuaaaauguaau

SEQ ID NO: 43787 - RNA, 12 nt, Homo sapiens
cuuaaauaauaa

SEQ ID NO: 43788 - RNA, 22 nt, Homo sapiens
cuuaagacgugauuuugcugua

SEQ ID NO: 43789 - RNA, 24 nt, Homo sapiens
cuuaauuauugauguuuucauaga

SEQ ID NO: 43790 - RNA, 20 nt, Homo sapiens
cuuacguccuuccacuucca

SEQ ID NO: 43791 - RNA, 15 nt, Homo sapiens
cuuacuguacaugaa

SEQ ID NO: 43792 - RNA, 18 nt, Homo sapiens
cuuagacccucaugcugc

SEQ ID NO: 43793 - RNA, 21 nt, Homo sapiens
cuuagacccucaugcugccaa

SEQ ID NO: 43794 - RNA, 22 nt, Homo sapiens
cuuagacccucaugcugccaau

SEQ ID NO: 43795 - RNA, 17 nt, Homo sapiens
cuuagcccaucuuucaa

SEQ ID NO: 43796 - RNA, 18 nt, Homo sapiens
cuuaguaugugcauuuaa

SEQ ID NO: 43797 - RNA, 13 nt, Homo sapiens
cuuaguugcugua

SEQ ID NO: 43798 - RNA, 21 nt, Homo sapiens
cuuaguugcuguaugucucgu

SEQ ID NO: 43799 - RNA, 16 nt, Homo sapiens
cuuauaggaauugacc

SEQ ID NO: 43800 - RNA, 15 nt, Homo sapiens
cuuauccuccaugaa

SEQ ID NO: 43801 - RNA, 22 nt, Homo sapiens
cuuauccuccaugaauaucagu

SEQ ID NO: 43802 - RNA, 14 nt, Homo sapiens
cuuauugacuauua

SEQ ID NO: 43803 - RNA, 22 nt, Homo sapiens
cuuauugguggcuguuccugaa

SEQ ID NO: 43804 - RNA, 17 nt, Homo sapiens
cuucagcgguuuauaua

SEQ ID NO: 43805 - RNA, 19 nt, Homo sapiens
cuucaugcauuugcacuau

SEQ ID NO: 43806 - RNA, 21 nt, Homo sapiens
cuuccaaacagaacuauggaa

SEQ ID NO: 43807 - RNA, 16 nt, Homo sapiens
cuuccacuuccaagau

SEQ ID NO: 43808 - RNA, 16 nt, Homo sapiens
cuuccagggcuacgcg

SEQ ID NO: 43809 - RNA, 23 nt, Homo sapiens
cuuccagggcuacgcgcgcuccg

SEQ ID NO: 43810 - RNA, 17 nt, Homo sapiens
cuuccauuuggaaucau

SEQ ID NO: 43811 - RNA, 14 nt, Homo sapiens
cuucccacacuguc

SEQ ID NO: 43812 - RNA, 21 nt, Homo sapiens
cuucccacacuguccauucuu

SEQ ID NO: 43813 - RNA, 13 nt, Homo sapiens
cuucccgcuguuc

SEQ ID NO: 43814 - RNA, 19 nt, Homo sapiens
cuucccgcuguuccucgcc

SEQ ID NO: 43815 - RNA, 19 nt, Homo sapiens
cuucccuuuuacauacugc

SEQ ID NO: 43816 - RNA, 14 nt, Homo sapiens
cuuccucccauuca

SEQ ID NO: 43817 - RNA, 15 nt, Homo sapiens
cuuccucccauucag

SEQ ID NO: 43818 - RNA, 22 nt, Homo sapiens
cuuccucccggccgcgcugcgc

SEQ ID NO: 43819 - RNA, 17 nt, Homo sapiens
cuuccuggcaauaguca

SEQ ID NO: 43820 - RNA, 11 nt, Homo sapiens
cuuccuuauca

SEQ ID NO: 43821 - RNA, 15 nt, Homo sapiens
cuuccuuaucacuga

SEQ ID NO: 43822 - RNA, 16 nt, Homo sapiens
cuuccuuaucacugac

SEQ ID NO: 43823 - RNA, 21 nt, Homo sapiens
cuucgugaugacauaucacau

SEQ ID NO: 43824 - RNA, 13 nt, Homo sapiens
cuucuauuuauuu

SEQ ID NO: 43825 - RNA, 22 nt, Homo sapiens
cuucucagaaggcaaaugacuu

SEQ ID NO: 43826 - RNA, 19 nt, Homo sapiens
cuucucaucugugauuccc

SEQ ID NO: 43827 - RNA, 19 nt, Homo sapiens
cuucuccauggcccugcca

SEQ ID NO: 43828 - RNA, 18 nt, Homo sapiens
cuucucuucacagucaca

SEQ ID NO: 43829 - RNA, 17 nt, Homo sapiens
cuucugggcagacucug

SEQ ID NO: 43830 - RNA, 18 nt, Homo sapiens
cuucuggguucaagcgau

SEQ ID NO: 43831 - RNA, 19 nt, Homo sapiens
cuucuggguucaagcgauu

SEQ ID NO: 43832 - RNA, 21 nt, Homo sapiens
cuucuuggucucagugucaau

SEQ ID NO: 43833 - RNA, 14 nt, Homo sapiens
cuucuugguucuga

SEQ ID NO: 43834 - RNA, 17 nt, Homo sapiens
cuucuuucaugaagggg

SEQ ID NO: 43835 - RNA, 21 nt, Homo sapiens
cuucuuucaugaaggggcggc

SEQ ID NO: 43836 - RNA, 16 nt, Homo sapiens
cuugaaacugagaugu

SEQ ID NO: 43837 - RNA, 12 nt, Homo sapiens
cuugaacccagg

SEQ ID NO: 43838 - RNA, 14 nt, Homo sapiens
cuugagaagagaau

SEQ ID NO: 43839 - RNA, 15 nt, Homo sapiens
cuugagccuugaacu

SEQ ID NO: 43840 - RNA, 19 nt, Homo sapiens
cuugaugaagaaguugaua

SEQ ID NO: 43841 - RNA, 13 nt, Homo sapiens
cuugaugauacaa

SEQ ID NO: 43842 - RNA, 21 nt, Homo sapiens
cuugauugugggauacuauuu

SEQ ID NO: 43843 - RNA, 23 nt, Homo sapiens
cuugcaaaguaucccuacuguaa

SEQ ID NO: 43844 - RNA, 16 nt, Homo sapiens
cuugcuccuggcuggg

SEQ ID NO: 43845 - RNA, 17 nt, Homo sapiens
cuugcuccuggcugggg

SEQ ID NO: 43846 - RNA, 19 nt, Homo sapiens
cuuggacaugggccccaga

SEQ ID NO: 43847 - RNA, 20 nt, Homo sapiens
cuuggcccaggaguuuggcc

SEQ ID NO: 43848 - RNA, 21 nt, Homo sapiens
cuuggcccaggaguuuggcca

SEQ ID NO: 43849 - RNA, 22 nt, Homo sapiens
cuuggcccaggaguuuggccag

SEQ ID NO: 43850 - RNA, 23 nt, Homo sapiens
cuuggcccaggaguuuggccaga

SEQ ID NO: 43851 - RNA, 14 nt, Homo sapiens
cuuggccccugcca

SEQ ID NO: 43852 - RNA, 15 nt, Homo sapiens
cuugguauagcauau

SEQ ID NO: 43853 - RNA, 18 nt, Homo sapiens
cuuggucacauacaauua

SEQ ID NO: 43854 - RNA, 12 nt, Homo sapiens
cuuggucucagu

SEQ ID NO: 43855 - RNA, 21 nt, Homo sapiens
cuuguagcucucugaccuccu

SEQ ID NO: 43856 - RNA, 22 nt, Homo sapiens
cuuguagcucucugaccuccuc

SEQ ID NO: 43857 - RNA, 15 nt, Homo sapiens
cuugugaacccaaag

SEQ ID NO: 43858 - RNA, 20 nt, Homo sapiens
cuuguuaaguaucagcuaca

SEQ ID NO: 43859 - RNA, 17 nt, Homo sapiens
cuuguuagcaaaaugga

SEQ ID NO: 43860 - RNA, 23 nt, Homo sapiens
cuuguuuuuccacuacugcuacc

SEQ ID NO: 43861 - RNA, 23 nt, Homo sapiens
cuuuaaaaaaaaaaaaaaagcca

SEQ ID NO: 43862 - RNA, 17 nt, Homo sapiens
cuuuaaaacuuauccuc

SEQ ID NO: 43863 - RNA, 19 nt, Homo sapiens
cuuuaaaacuuauccucca

SEQ ID NO: 43864 - RNA, 20 nt, Homo sapiens
cuuuaaagggauggcaagau

SEQ ID NO: 43865 - RNA, 18 nt, Homo sapiens
cuuuaacacagugucugg

SEQ ID NO: 43866 - RNA, 15 nt, Homo sapiens
cuuuaagaacuaaaa

SEQ ID NO: 43867 - RNA, 19 nt, Homo sapiens
cuuuaaguguaacuggcag

SEQ ID NO: 43868 - RNA, 20 nt, Homo sapiens
cuuuacuguccccaucauca

SEQ ID NO: 43869 - RNA, 13 nt, Homo sapiens
cuuuaucucaggg

SEQ ID NO: 43870 - RNA, 19 nt, Homo sapiens
cuuucaagggaccucucca

SEQ ID NO: 43871 - RNA, 22 nt, Homo sapiens
cuuucaagggaccucuccauga

SEQ ID NO: 43872 - RNA, 22 nt, Homo sapiens
cuuucacauuggcuauuuaaag

SEQ ID NO: 43873 - RNA, 19 nt, Homo sapiens
cuuucagauaacuguuauu

SEQ ID NO: 43874 - RNA, 20 nt, Homo sapiens
cuuucagcucagcuaaugaa

SEQ ID NO: 43875 - RNA, 21 nt, Homo sapiens
cuuucaugaaggggcggcggc

SEQ ID NO: 43876 - RNA, 13 nt, Homo sapiens
cuuugaagucuga

SEQ ID NO: 43877 - RNA, 15 nt, Homo sapiens
cuuugaagucugauu

SEQ ID NO: 43878 - RNA, 17 nt, Homo sapiens
cuuugaccucugcagca

SEQ ID NO: 43879 - RNA, 18 nt, Homo sapiens
cuuugaccucugcagcaa

SEQ ID NO: 43880 - RNA, 21 nt, Homo sapiens
cuuugcuuuaaguguaacugg

SEQ ID NO: 43881 - RNA, 21 nt, Homo sapiens
cuuugggaggcugaggcgggu

SEQ ID NO: 43882 - RNA, 22 nt, Homo sapiens
cuuugggaggcugaggcgggug

SEQ ID NO: 43883 - RNA, 23 nt, Homo sapiens
cuuugggaggcugaggcgggugg

SEQ ID NO: 43884 - RNA, 22 nt, Homo sapiens
cuuugugcagauucuuuacccc

SEQ ID NO: 43885 - RNA, 23 nt, Homo sapiens
cuuugugcagauucuuuaccccc

SEQ ID NO: 43886 - RNA, 22 nt, Homo sapiens
cuuuguugcuaucaauccaaga

SEQ ID NO: 43887 - RNA, 14 nt, Homo sapiens
cuuuucaacacaca

SEQ ID NO: 43888 - RNA, 19 nt, Homo sapiens
cuuuucaacacacaaagca

SEQ ID NO: 43889 - RNA, 11 nt, Homo sapiens
cuuuucucugc

SEQ ID NO: 43890 - RNA, 14 nt, Homo sapiens
cuuuucuuuucuuu

SEQ ID NO: 43891 - RNA, 11 nt, Homo sapiens
cuuuugugcau

SEQ ID NO: 43892 - RNA, 13 nt, Homo sapiens
cuuuugugcauua

SEQ ID NO: 43893 - RNA, 18 nt, Homo sapiens
cuuuuuccagguuccuga

SEQ ID NO: 43894 - RNA, 13 nt, Homo sapiens
gaaaaacauuuca

SEQ ID NO: 43895 - RNA, 18 nt, Homo sapiens
gaaaagauuaugaucuca

SEQ ID NO: 43896 - RNA, 17 nt, Homo sapiens
gaaaagggaacugaaca

SEQ ID NO: 43897 - RNA, 17 nt, Homo sapiens
gaaaaggugucuugcug

SEQ ID NO: 43898 - RNA, 15 nt, Homo sapiens
gaaaaguuucccagu

SEQ ID NO: 43899 - RNA, 16 nt, Homo sapiens
gaaaauaaaagcacuu

SEQ ID NO: 43900 - RNA, 17 nt, Homo sapiens
gaaaauaaaauauuuaa

SEQ ID NO: 43901 - RNA, 19 nt, Homo sapiens
gaaaauaguggugugauuu

SEQ ID NO: 43902 - RNA, 12 nt, Homo sapiens
gaaaauaugccu

SEQ ID NO: 43903 - RNA, 19 nt, Homo sapiens
gaaaaucugcacugugggc

SEQ ID NO: 43904 - RNA, 18 nt, Homo sapiens
gaaaaugguauuaaagau

SEQ ID NO: 43905 - RNA, 13 nt, Homo sapiens
gaaaaugugcaau

SEQ ID NO: 43906 - RNA, 14 nt, Homo sapiens
gaaaaugugcaaua

SEQ ID NO: 43907 - RNA, 15 nt, Homo sapiens
gaaaccagggagccc

SEQ ID NO: 43908 - RNA, 17 nt, Homo sapiens
gaaaccuuauuguaccu

SEQ ID NO: 43909 - RNA, 21 nt, Homo sapiens
gaaacuccacauccuguggga

SEQ ID NO: 43910 - RNA, 19 nt, Homo sapiens
gaaacugccagcaacgcag

SEQ ID NO: 43911 - RNA, 14 nt, Homo sapiens
gaaagaagagccgg

SEQ ID NO: 43912 - RNA, 19 nt, Homo sapiens
gaaagaagagccggagccu

SEQ ID NO: 43913 - RNA, 18 nt, Homo sapiens
gaaagacuauucaaacag

SEQ ID NO: 43914 - RNA, 13 nt, Homo sapiens
gaaagcagggacu

SEQ ID NO: 43915 - RNA, 17 nt, Homo sapiens
gaaagcugaguguuuca

SEQ ID NO: 43916 - RNA, 22 nt, Homo sapiens
gaaagcuguggccagcuuguua

SEQ ID NO: 43917 - RNA, 23 nt, Homo sapiens
gaaagcuugcccuggugccucac

SEQ ID NO: 43918 - RNA, 13 nt, Homo sapiens
gaaagguacuuca

SEQ ID NO: 43919 - RNA, 14 nt, Homo sapiens
gaaagucccagauc

SEQ ID NO: 43920 - RNA, 15 nt, Homo sapiens
gaaauaaaccuauga

SEQ ID NO: 43921 - RNA, 16 nt, Homo sapiens
gaaauaaaccuaugaa

SEQ ID NO: 43922 - RNA, 17 nt, Homo sapiens
gaaauaaaccuaugaau

SEQ ID NO: 43923 - RNA, 23 nt, Homo sapiens
gaaauacacuguuaucuucacuu

SEQ ID NO: 43924 - RNA, 13 nt, Homo sapiens
gaaauaggaaaua

SEQ ID NO: 43925 - RNA, 18 nt, Homo sapiens
gaaauaggaaauauuuua

SEQ ID NO: 43926 - RNA, 17 nt, Homo sapiens
gaaauagugucugauga

SEQ ID NO: 43927 - RNA, 14 nt, Homo sapiens
gaaauauuccuuaa

SEQ ID NO: 43928 - RNA, 22 nt, Homo sapiens
gaaauauuccuuaagauauuaa

SEQ ID NO: 43929 - RNA, 17 nt, Homo sapiens
gaaauauuuauuuuaau

SEQ ID NO: 43930 - RNA, 14 nt, Homo sapiens
gaaauauuuuaaug

SEQ ID NO: 43931 - RNA, 21 nt, Homo sapiens
gaaaugacuaaaaaacaaaga

SEQ ID NO: 43932 - RNA, 23 nt, Homo sapiens
gaaauuugccaauuuacuuuguu

SEQ ID NO: 43933 - RNA, 13 nt, Homo sapiens
gaacacaucagcu

SEQ ID NO: 43934 - RNA, 14 nt, Homo sapiens
gaacacaucagcuu

SEQ ID NO: 43935 - RNA, 14 nt, Homo sapiens
gaacagaagaggaa

SEQ ID NO: 43936 - RNA, 11 nt, Homo sapiens
gaacauaaaau

SEQ ID NO: 43937 - RNA, 12 nt, Homo sapiens
gaaccaccugcc

SEQ ID NO: 43938 - RNA, 21 nt, Homo sapiens
gaaccacucuaucaaguauua

SEQ ID NO: 43939 - RNA, 16 nt, Homo sapiens
gaacccgggaggcaga

SEQ ID NO: 43940 - RNA, 20 nt, Homo sapiens
gaaccguuugugauugccau

SEQ ID NO: 43941 - RNA, 21 nt, Homo sapiens
gaaccguuugugauugccauu

SEQ ID NO: 43942 - RNA, 14 nt, Homo sapiens
gaacuaaaauguuc

SEQ ID NO: 43943 - RNA, 21 nt, Homo sapiens
gaacucaaggaaaucuguguc

SEQ ID NO: 43944 - RNA, 15 nt, Homo sapiens
gaacugaacauucca

SEQ ID NO: 43945 - RNA, 17 nt, Homo sapiens
gaacugcauauguuucg

SEQ ID NO: 43946 - RNA, 12 nt, Homo sapiens
gaacugcuggau

SEQ ID NO: 43947 - RNA, 20 nt, Homo sapiens
gaacugcuggauucaaguga

SEQ ID NO: 43948 - RNA, 23 nt, Homo sapiens
gaacuuauuuguacauuuuuuuu

SEQ ID NO: 43949 - RNA, 18 nt, Homo sapiens
gaacuuuuuguuuuguuu

SEQ ID NO: 43950 - RNA, 23 nt, Homo sapiens
gaagaaaauaguggugugauuug

SEQ ID NO: 43951 - RNA, 14 nt, Homo sapiens
gaagaaauuccagg

SEQ ID NO: 43952 - RNA, 14 nt, Homo sapiens
gaagaaauucugca

SEQ ID NO: 43953 - RNA, 18 nt, Homo sapiens
gaagaagcaccaaucaug

SEQ ID NO: 43954 - RNA, 11 nt, Homo sapiens
gaagaaugacu

SEQ ID NO: 43955 - RNA, 17 nt, Homo sapiens
gaagacaaugacuuacu

SEQ ID NO: 43956 - RNA, 23 nt, Homo sapiens
gaagagaauauuagcuuuacugu

SEQ ID NO: 43957 - RNA, 15 nt, Homo sapiens
gaagagccggagccu

SEQ ID NO: 43958 - RNA, 20 nt, Homo sapiens
gaagagccggagccuccagc

SEQ ID NO: 43959 - RNA, 22 nt, Homo sapiens
gaagagguuuuaaagcuuccau

SEQ ID NO: 43960 - RNA, 19 nt, Homo sapiens
gaagaguggguuucacaag

SEQ ID NO: 43961 - RNA, 22 nt, Homo sapiens
gaagaguggguuucacaaguga

SEQ ID NO: 43962 - RNA, 13 nt, Homo sapiens
gaagauacugaaa

SEQ ID NO: 43963 - RNA, 15 nt, Homo sapiens
gaagauucuauguua

SEQ ID NO: 43964 - RNA, 23 nt, Homo sapiens
gaagauucuauguuaauauuuua

SEQ ID NO: 43965 - RNA, 14 nt, Homo sapiens
gaagcacagugauc

SEQ ID NO: 43966 - RNA, 13 nt, Homo sapiens
gaagcaucacagg

SEQ ID NO: 43967 - RNA, 13 nt, Homo sapiens
gaagcaucguguc

SEQ ID NO: 43968 - RNA, 16 nt, Homo sapiens
gaagccucuauugcca

SEQ ID NO: 43969 - RNA, 17 nt, Homo sapiens
gaagccucuauugccau

SEQ ID NO: 43970 - RNA, 19 nt, Homo sapiens
gaagccucuauugccauga

SEQ ID NO: 43971 - RNA, 12 nt, Homo sapiens
gaaggauacaaa

SEQ ID NO: 43972 - RNA, 9 nt, Homo sapiens
gaaggggcg

SEQ ID NO: 43973 - RNA, 15 nt, Homo sapiens
gaaggggcggcggcc

SEQ ID NO: 43974 - RNA, 17 nt, Homo sapiens
gaaggggcggcggcccu

SEQ ID NO: 43975 - RNA, 15 nt, Homo sapiens
gaaguaaauguuguu

SEQ ID NO: 43976 - RNA, 22 nt, Homo sapiens
gaaguacucauacauguuacaa

SEQ ID NO: 43977 - RNA, 20 nt, Homo sapiens
gaaguauccuucagccugaa

SEQ ID NO: 43978 - RNA, 12 nt, Homo sapiens
gaagucaaggcu

SEQ ID NO: 43979 - RNA, 15 nt, Homo sapiens
gaagucaaggcuuag

SEQ ID NO: 43980 - RNA, 15 nt, Homo sapiens
gaagucuucuauuua

SEQ ID NO: 43981 - RNA, 16 nt, Homo sapiens
gaaguuuaauugacuu

SEQ ID NO: 43982 - RNA, 18 nt, Homo sapiens
gaauaaauaaauguaucu

SEQ ID NO: 43983 - RNA, 17 nt, Homo sapiens
gaauacauaaaguaugu

SEQ ID NO: 43984 - RNA, 17 nt, Homo sapiens
gaauacauucugcuuuc

SEQ ID NO: 43985 - RNA, 15 nt, Homo sapiens
gaauacuaauaaaau

SEQ ID NO: 43986 - RNA, 19 nt, Homo sapiens
gaauacuaauaaaauacau

SEQ ID NO: 43987 - RNA, 22 nt, Homo sapiens
gaauaguguuggaaaaugugca

SEQ ID NO: 43988 - RNA, 14 nt, Homo sapiens
gaauaucaguuauu

SEQ ID NO: 43989 - RNA, 17 nt, Homo sapiens
gaaucacuggcuguuaa

SEQ ID NO: 43990 - RNA, 17 nt, Homo sapiens
gaaucacuugaacccgg

SEQ ID NO: 43991 - RNA, 16 nt, Homo sapiens
gaaucccuuaaacuca

SEQ ID NO: 43992 - RNA, 14 nt, Homo sapiens
gaaugaccuggccg

SEQ ID NO: 43993 - RNA, 14 nt, Homo sapiens
gaaugagaagaaug

SEQ ID NO: 43994 - RNA, 17 nt, Homo sapiens
gaaugagaagaaugacu

SEQ ID NO: 43995 - RNA, 15 nt, Homo sapiens
gaauguaugugcaca

SEQ ID NO: 43996 - RNA, 15 nt, Homo sapiens
gaauuaacacaugau

SEQ ID NO: 43997 - RNA, 16 nt, Homo sapiens
gaauuaacacaugauc

SEQ ID NO: 43998 - RNA, 13 nt, Homo sapiens
gaauuaauggaau

SEQ ID NO: 43999 - RNA, 21 nt, Homo sapiens
gaauuacaggcgugagccacc

SEQ ID NO: 44000 - RNA, 22 nt, Homo sapiens
gaauuacaggcgugagccacca

SEQ ID NO: 44001 - RNA, 23 nt, Homo sapiens
gaauuacaggcgugagccaccaa

SEQ ID NO: 44002 - RNA, 17 nt, Homo sapiens
gaauucacuccacuugg

SEQ ID NO: 44003 - RNA, 23 nt, Homo sapiens
gaauucuuacauguuuucuuugc

SEQ ID NO: 44004 - RNA, 11 nt, Homo sapiens
gaauugaccca

SEQ ID NO: 44005 - RNA, 16 nt, Homo sapiens
gaauugacccacaaga

SEQ ID NO: 44006 - RNA, 18 nt, Homo sapiens
gaauugcuugaacccagg

SEQ ID NO: 44007 - RNA, 15 nt, Homo sapiens
gaauuggagcucgug

SEQ ID NO: 44008 - RNA, 16 nt, Homo sapiens
gaauuggagcucgugg

SEQ ID NO: 44009 - RNA, 20 nt, Homo sapiens
gaauuguuuuuauggaggcu

SEQ ID NO: 44010 - RNA, 12 nt, Homo sapiens
gaauuuccuuac

SEQ ID NO: 44011 - RNA, 14 nt, Homo sapiens
gaauuuucuuccaa

SEQ ID NO: 44012 - RNA, 16 nt, Homo sapiens
gacaaagacaaauucu

SEQ ID NO: 44013 - RNA, 18 nt, Homo sapiens
gacaaagacaaauucugu

SEQ ID NO: 44014 - RNA, 16 nt, Homo sapiens
gacaaaugacccccau

SEQ ID NO: 44015 - RNA, 16 nt, Homo sapiens
gacaacauuaaaacaa

SEQ ID NO: 44016 - RNA, 15 nt, Homo sapiens
gacaacugugacugu

SEQ ID NO: 44017 - RNA, 17 nt, Homo sapiens
gacaagcucacagaccu

SEQ ID NO: 44018 - RNA, 18 nt, Homo sapiens
gacaagcucacagaccuu

SEQ ID NO: 44019 - RNA, 14 nt, Homo sapiens
gacacacugaagaa

SEQ ID NO: 44020 - RNA, 15 nt, Homo sapiens
gacacacugaagaag

SEQ ID NO: 44021 - RNA, 13 nt, Homo sapiens
gacacagcugcag

SEQ ID NO: 44022 - RNA, 22 nt, Homo sapiens
gacacaggcuccaaacuggagc

SEQ ID NO: 44023 - RNA, 23 nt, Homo sapiens
gacacaggcuccaaacuggagcu

SEQ ID NO: 44024 - RNA, 17 nt, Homo sapiens
gacacaugcaaggucau

SEQ ID NO: 44025 - RNA, 17 nt, Homo sapiens
gacacaugggugcuauu

SEQ ID NO: 44026 - RNA, 20 nt, Homo sapiens
gacaccaccacccuugccau

SEQ ID NO: 44027 - RNA, 21 nt, Homo sapiens
gacaccaccacccuugccaug

SEQ ID NO: 44028 - RNA, 22 nt, Homo sapiens
gacaccaccacccuugccaugg

SEQ ID NO: 44029 - RNA, 13 nt, Homo sapiens
gacaccgaguggc

SEQ ID NO: 44030 - RNA, 17 nt, Homo sapiens
gacacuaaaacaccuca

SEQ ID NO: 44031 - RNA, 13 nt, Homo sapiens
gacagaaagcaga

SEQ ID NO: 44032 - RNA, 20 nt, Homo sapiens
gacaggaggggaaggcaaca

SEQ ID NO: 44033 - RNA, 18 nt, Homo sapiens
gacaggauaagagggauu

SEQ ID NO: 44034 - RNA, 20 nt, Homo sapiens
gacaggauaagagggauuag

SEQ ID NO: 44035 - RNA, 21 nt, Homo sapiens
gacaggauaagagggauuagg

SEQ ID NO: 44036 - RNA, 15 nt, Homo sapiens
gacaguuuucugcuu

SEQ ID NO: 44037 - RNA, 19 nt, Homo sapiens
gacauaagcaaagacuaug

SEQ ID NO: 44038 - RNA, 19 nt, Homo sapiens
gacaugagagacagcaggu

SEQ ID NO: 44039 - RNA, 22 nt, Homo sapiens
gacaugagagacagcaggucuc

SEQ ID NO: 44040 - RNA, 16 nt, Homo sapiens
gacaugggacauuugc

SEQ ID NO: 44041 - RNA, 20 nt, Homo sapiens
gacaugggccccagauacca

SEQ ID NO: 44042 - RNA, 19 nt, Homo sapiens
gacauguuuacaaaccuca

SEQ ID NO: 44043 - RNA, 17 nt, Homo sapiens
gaccaaggcccccgggc

SEQ ID NO: 44044 - RNA, 18 nt, Homo sapiens
gaccaaggcccccgggcc

SEQ ID NO: 44045 - RNA, 21 nt, Homo sapiens
gaccaaggcccccgggccgac

SEQ ID NO: 44046 - RNA, 24 nt, Homo sapiens
gaccaaggcccccgggccgacgga

SEQ ID NO: 44047 - RNA, 22 nt, Homo sapiens
gaccaauaaccaugcccaagaa

SEQ ID NO: 44048 - RNA, 21 nt, Homo sapiens
gaccacgcuuucuagcuguug

SEQ ID NO: 44049 - RNA, 14 nt, Homo sapiens
gaccacguuucuaa

SEQ ID NO: 44050 - RNA, 16 nt, Homo sapiens
gaccagccaaccuggg

SEQ ID NO: 44051 - RNA, 17 nt, Homo sapiens
gaccaggcacccccaga

SEQ ID NO: 44052 - RNA, 22 nt, Homo sapiens
gaccauaaccccggaagccaaa

SEQ ID NO: 44053 - RNA, 13 nt, Homo sapiens
gaccaucccggcc

SEQ ID NO: 44054 - RNA, 19 nt, Homo sapiens
gaccaucccggccggcgcg

SEQ ID NO: 44055 - RNA, 21 nt, Homo sapiens
gaccaucccggccggcgcgcu

SEQ ID NO: 44056 - RNA, 22 nt, Homo sapiens
gaccaucccggccggcgcgcuc

SEQ ID NO: 44057 - RNA, 14 nt, Homo sapiens
gacccucaugcugc

SEQ ID NO: 44058 - RNA, 15 nt, Homo sapiens
gacccucaugcugcc

SEQ ID NO: 44059 - RNA, 14 nt, Homo sapiens
gaccuccuccuuca

SEQ ID NO: 44060 - RNA, 15 nt, Homo sapiens
gaccuccuccuucau

SEQ ID NO: 44061 - RNA, 11 nt, Homo sapiens
gaccugcuguu

SEQ ID NO: 44062 - RNA, 12 nt, Homo sapiens
gaccugcuucua

SEQ ID NO: 44063 - RNA, 14 nt, Homo sapiens
gaccuucccagcua

SEQ ID NO: 44064 - RNA, 22 nt, Homo sapiens
gaccuuuguagccacuucacuu

SEQ ID NO: 44065 - RNA, 13 nt, Homo sapiens
gacgaaccuugaa

SEQ ID NO: 44066 - RNA, 13 nt, Homo sapiens
gacgcugcugccg

SEQ ID NO: 44067 - RNA, 14 nt, Homo sapiens
gacgcugcugccgu

SEQ ID NO: 44068 - RNA, 15 nt, Homo sapiens
gacgcugcugccgug

SEQ ID NO: 44069 - RNA, 17 nt, Homo sapiens
gacgcugcugccguggg

SEQ ID NO: 44070 - RNA, 13 nt, Homo sapiens
gacggagccggga

SEQ ID NO: 44071 - RNA, 14 nt, Homo sapiens
gacggagccgggaa

SEQ ID NO: 44072 - RNA, 11 nt, Homo sapiens
gacggcuccgg

SEQ ID NO: 44073 - RNA, 14 nt, Homo sapiens
gacggcuccggacg

SEQ ID NO: 44074 - RNA, 15 nt, Homo sapiens
gacggcuccggacgc

SEQ ID NO: 44075 - RNA, 20 nt, Homo sapiens
gacggcuccggacgcugcug

SEQ ID NO: 44076 - RNA, 21 nt, Homo sapiens
gacgggguuugccaugcuggc

SEQ ID NO: 44077 - RNA, 13 nt, Homo sapiens
gacgugacuggcc

SEQ ID NO: 44078 - RNA, 18 nt, Homo sapiens
gacgugauuuugcuguag

SEQ ID NO: 44079 - RNA, 19 nt, Homo sapiens
gacgugauuuugcuguaga

SEQ ID NO: 44080 - RNA, 12 nt, Homo sapiens
gacuaaaaaaca

SEQ ID NO: 44081 - RNA, 14 nt, Homo sapiens
gacuaaaaaacaaa

SEQ ID NO: 44082 - RNA, 15 nt, Homo sapiens
gacuaauuaggcaag

SEQ ID NO: 44083 - RNA, 20 nt, Homo sapiens
gacuauuauagaauggaacu

SEQ ID NO: 44084 - RNA, 21 nt, Homo sapiens
gacucauuuuaaaaaauggaa

SEQ ID NO: 44085 - RNA, 18 nt, Homo sapiens
gacucuggucaagaagca

SEQ ID NO: 44086 - RNA, 12 nt, Homo sapiens
gacucuuaagaa

SEQ ID NO: 44087 - RNA, 22 nt, Homo sapiens
gacugaguacguugugcauuug

SEQ ID NO: 44088 - RNA, 21 nt, Homo sapiens
gacugcuaguuuauauagaaa

SEQ ID NO: 44089 - RNA, 13 nt, Homo sapiens
gacuggccugcug

SEQ ID NO: 44090 - RNA, 14 nt, Homo sapiens
gacuggccugcugg

SEQ ID NO: 44091 - RNA, 15 nt, Homo sapiens
gacuggccugcugga

SEQ ID NO: 44092 - RNA, 16 nt, Homo sapiens
gacuguacccaaaugg

SEQ ID NO: 44093 - RNA, 17 nt, Homo sapiens
gacuguacccaaaugga

SEQ ID NO: 44094 - RNA, 15 nt, Homo sapiens
gacuuaaaaucuaau

SEQ ID NO: 44095 - RNA, 17 nt, Homo sapiens
gacuucugucuucacaa

SEQ ID NO: 44096 - RNA, 17 nt, Homo sapiens
gacuuggccccugccac

SEQ ID NO: 44097 - RNA, 18 nt, Homo sapiens
gacuuggccccugccacc

SEQ ID NO: 44098 - RNA, 13 nt, Homo sapiens
gacuugggcggga

SEQ ID NO: 44099 - RNA, 14 nt, Homo sapiens
gacuugggcgggac

SEQ ID NO: 44100 - RNA, 16 nt, Homo sapiens
gacuuguacucugaaa

SEQ ID NO: 44101 - RNA, 17 nt, Homo sapiens
gacuuguacucugaaag

SEQ ID NO: 44102 - RNA, 16 nt, Homo sapiens
gacuuuggcaaaugag

SEQ ID NO: 44103 - RNA, 11 nt, Homo sapiens
gacuuuuuaug

SEQ ID NO: 44104 - RNA, 16 nt, Homo sapiens
gagaaaauaaaagcac

SEQ ID NO: 44105 - RNA, 23 nt, Homo sapiens
gagaaaccagggagccccuuuga

SEQ ID NO: 44106 - RNA, 20 nt, Homo sapiens
gagaaaccuuauuguaccuc

SEQ ID NO: 44107 - RNA, 19 nt, Homo sapiens
gagaacugcauauguuucg

SEQ ID NO: 44108 - RNA, 18 nt, Homo sapiens
gagaagaaugacuaugca

SEQ ID NO: 44109 - RNA, 22 nt, Homo sapiens
gagaagagcuguucacagccag

SEQ ID NO: 44110 - RNA, 21 nt, Homo sapiens
gagaaggcuguggauuuaaug

SEQ ID NO: 44111 - RNA, 15 nt, Homo sapiens
gagaauaaaaaaugu

SEQ ID NO: 44112 - RNA, 18 nt, Homo sapiens
gagaaucagaucauuuca

SEQ ID NO: 44113 - RNA, 20 nt, Homo sapiens
gagaauuuccuuacucuuga

SEQ ID NO: 44114 - RNA, 15 nt, Homo sapiens
gagacacacugaaga

SEQ ID NO: 44115 - RNA, 13 nt, Homo sapiens
gagacacaugggu

SEQ ID NO: 44116 - RNA, 15 nt, Homo sapiens
gagacaccaccaccc

SEQ ID NO: 44117 - RNA, 22 nt, Homo sapiens
gagacaccaccacccuugccau

SEQ ID NO: 44118 - RNA, 14 nt, Homo sapiens
gagacagaaagcag

SEQ ID NO: 44119 - RNA, 14 nt, Homo sapiens
gagacagcaggucu

SEQ ID NO: 44120 - RNA, 15 nt, Homo sapiens
gagacagcaggucuc

SEQ ID NO: 44121 - RNA, 19 nt, Homo sapiens
gagaccaaggcccccgggc

SEQ ID NO: 44122 - RNA, 13 nt, Homo sapiens
gagaccagccaac

SEQ ID NO: 44123 - RNA, 16 nt, Homo sapiens
gagaccagccaaccug

SEQ ID NO: 44124 - RNA, 18 nt, Homo sapiens
gagaccagccaaccuggg

SEQ ID NO: 44125 - RNA, 17 nt, Homo sapiens
gagacgggguuugccau

SEQ ID NO: 44126 - RNA, 19 nt, Homo sapiens
gagacgggguuugccaugc

SEQ ID NO: 44127 - RNA, 20 nt, Homo sapiens
gagacgggguuugccaugcu

SEQ ID NO: 44128 - RNA, 22 nt, Homo sapiens
gagacgggguuugccaugcugg

SEQ ID NO: 44129 - RNA, 17 nt, Homo sapiens
gagacucugucucaguc

SEQ ID NO: 44130 - RNA, 13 nt, Homo sapiens
gagagaaugagag

SEQ ID NO: 44131 - RNA, 17 nt, Homo sapiens
gagagacacacugaaga

SEQ ID NO: 44132 - RNA, 18 nt, Homo sapiens
gagagacacacugaagaa

SEQ ID NO: 44133 - RNA, 20 nt, Homo sapiens
gagauggaaguugcagugag

SEQ ID NO: 44134 - RNA, 21 nt, Homo sapiens
gagaugggagaaucacuugaa

SEQ ID NO: 44135 - RNA, 21 nt, Homo sapiens
gagauugugccccugcacucc

SEQ ID NO: 44136 - RNA, 10 nt, Homo sapiens
gagcaaaagu

SEQ ID NO: 44137 - RNA, 12 nt, Homo sapiens
gagcaccugcag

SEQ ID NO: 44138 - RNA, 16 nt, Homo sapiens
gagcaccugcaggcgu

SEQ ID NO: 44139 - RNA, 19 nt, Homo sapiens
gagcaccugcaggcgugac

SEQ ID NO: 44140 - RNA, 23 nt, Homo sapiens
gagcaccugcaggcgugaccuga

SEQ ID NO: 44141 - RNA, 16 nt, Homo sapiens
gagcaggcuacuguca

SEQ ID NO: 44142 - RNA, 15 nt, Homo sapiens
gagcaguagcagcag

SEQ ID NO: 44143 - RNA, 17 nt, Homo sapiens
gagcaguagcagcagca

SEQ ID NO: 44144 - RNA, 14 nt, Homo sapiens
gagcagucagaaga

SEQ ID NO: 44145 - RNA, 12 nt, Homo sapiens
gagcagucagga

SEQ ID NO: 44146 - RNA, 23 nt, Homo sapiens
gagcaucacaguuuugguugcuu

SEQ ID NO: 44147 - RNA, 19 nt, Homo sapiens
gagccaccaaacccggccu

SEQ ID NO: 44148 - RNA, 21 nt, Homo sapiens
gagccaccaaacccggccuga

SEQ ID NO: 44149 - RNA, 12 nt, Homo sapiens
gagccccaaaag

SEQ ID NO: 44150 - RNA, 18 nt, Homo sapiens
gagccccuugggcagguc

SEQ ID NO: 44151 - RNA, 11 nt, Homo sapiens
gagccggagcc

SEQ ID NO: 44152 - RNA, 14 nt, Homo sapiens
gagccggagccucc

SEQ ID NO: 44153 - RNA, 15 nt, Homo sapiens
gagccggagccucca

SEQ ID NO: 44154 - RNA, 21 nt, Homo sapiens
gagccggagccuccagcugcc

SEQ ID NO: 44155 - RNA, 22 nt, Homo sapiens
gagccggagccuccagcugccc

SEQ ID NO: 44156 - RNA, 13 nt, Homo sapiens
gagccgggaaaga

SEQ ID NO: 44157 - RNA, 21 nt, Homo sapiens
gagccgggaaagaagagccgg

SEQ ID NO: 44158 - RNA, 23 nt, Homo sapiens
gagccgggaaagaagagccggag

SEQ ID NO: 44159 - RNA, 21 nt, Homo sapiens
gagccgguccuugcugcaccu

SEQ ID NO: 44160 - RNA, 13 nt, Homo sapiens
gagccuccagcug

SEQ ID NO: 44161 - RNA, 16 nt, Homo sapiens
gagccuccagcugccc

SEQ ID NO: 44162 - RNA, 18 nt, Homo sapiens
gagccuccagcugccccg

SEQ ID NO: 44163 - RNA, 22 nt, Homo sapiens
gagccuccagcugccccgggga

SEQ ID NO: 44164 - RNA, 16 nt, Homo sapiens
gagcgagccccaggcg

SEQ ID NO: 44165 - RNA, 12 nt, Homo sapiens
gagcgcgcgcgc

SEQ ID NO: 44166 - RNA, 13 nt, Homo sapiens
gagcgcgcgcgcc

SEQ ID NO: 44167 - RNA, 14 nt, Homo sapiens
gagcgcgcgcgccc

SEQ ID NO: 44168 - RNA, 19 nt, Homo sapiens
gagcgcgcgcgcccucugg

SEQ ID NO: 44169 - RNA, 20 nt, Homo sapiens
gagcgcgcgcgcccucuggc

SEQ ID NO: 44170 - RNA, 17 nt, Homo sapiens
gagcgcuaccucuccag

SEQ ID NO: 44171 - RNA, 20 nt, Homo sapiens
gagcggaccuucccagcuag

SEQ ID NO: 44172 - RNA, 15 nt, Homo sapiens
gagcuacaggcccca

SEQ ID NO: 44173 - RNA, 22 nt, Homo sapiens
gagcucccaggaggggcuucug

SEQ ID NO: 44174 - RNA, 20 nt, Homo sapiens
gagcugauaucaugccccug

SEQ ID NO: 44175 - RNA, 18 nt, Homo sapiens
gagcugccucucucaucc

SEQ ID NO: 44176 - RNA, 16 nt, Homo sapiens
gagcugcuagaguucu

SEQ ID NO: 44177 - RNA, 19 nt, Homo sapiens
gagcuguuuucccugaccu

SEQ ID NO: 44178 - RNA, 20 nt, Homo sapiens
gagcuguuuucccugaccuc

SEQ ID NO: 44179 - RNA, 23 nt, Homo sapiens
gagcuugaaauagugucugauga

SEQ ID NO: 44180 - RNA, 21 nt, Homo sapiens
gagcuuuuguagaagucacau

SEQ ID NO: 44181 - RNA, 18 nt, Homo sapiens
gaggaauauuugcaagac

SEQ ID NO: 44182 - RNA, 16 nt, Homo sapiens
gaggaaugaaguacuc

SEQ ID NO: 44183 - RNA, 15 nt, Homo sapiens
gaggacuugggcggg

SEQ ID NO: 44184 - RNA, 16 nt, Homo sapiens
gaggacuugggcggga

SEQ ID NO: 44185 - RNA, 17 nt, Homo sapiens
gaggacuugggcgggac

SEQ ID NO: 44186 - RNA, 16 nt, Homo sapiens
gaggagaaacuggaac

SEQ ID NO: 44187 - RNA, 19 nt, Homo sapiens
gaggagaaacuggaacucu

SEQ ID NO: 44188 - RNA, 18 nt, Homo sapiens
gaggcagagguugcagug

SEQ ID NO: 44189 - RNA, 20 nt, Homo sapiens
gaggcagagguugcagugag

SEQ ID NO: 44190 - RNA, 16 nt, Homo sapiens
gaggcauuugcagcug

SEQ ID NO: 44191 - RNA, 19 nt, Homo sapiens
gaggcggguggaucacuug

SEQ ID NO: 44192 - RNA, 12 nt, Homo sapiens
gaggcugagaug

SEQ ID NO: 44193 - RNA, 19 nt, Homo sapiens
gagggaagccuuggggcug

SEQ ID NO: 44194 - RNA, 18 nt, Homo sapiens
gagggcgcggggcgggga

SEQ ID NO: 44195 - RNA, 15 nt, Homo sapiens
gagggcuaauaucuu

SEQ ID NO: 44196 - RNA, 18 nt, Homo sapiens
gagggcuugaggacuugg

SEQ ID NO: 44197 - RNA, 15 nt, Homo sapiens
gaggggaaggcaaca

SEQ ID NO: 44198 - RNA, 14 nt, Homo sapiens
gaggggcgcucgcu

SEQ ID NO: 44199 - RNA, 15 nt, Homo sapiens
gaggggcgcucgcuu

SEQ ID NO: 44200 - RNA, 18 nt, Homo sapiens
gaggggcgcucgcuuccg

SEQ ID NO: 44201 - RNA, 19 nt, Homo sapiens
gaggggcgcucgcuuccgc

SEQ ID NO: 44202 - RNA, 23 nt, Homo sapiens
gaggggcgcucgcuuccgcaucc

SEQ ID NO: 44203 - RNA, 17 nt, Homo sapiens
gaggggcuucugggcag

SEQ ID NO: 44204 - RNA, 12 nt, Homo sapiens
gagguaccagcc

SEQ ID NO: 44205 - RNA, 17 nt, Homo sapiens
gagguacugagagugaa

SEQ ID NO: 44206 - RNA, 13 nt, Homo sapiens
gaggucucugaac

SEQ ID NO: 44207 - RNA, 15 nt, Homo sapiens
gaguaccauaauucu

SEQ ID NO: 44208 - RNA, 13 nt, Homo sapiens
gagugcaguggcg

SEQ ID NO: 44209 - RNA, 14 nt, Homo sapiens
gagugcaguggcgc

SEQ ID NO: 44210 - RNA, 14 nt, Homo sapiens
gagugccuguaauc

SEQ ID NO: 44211 - RNA, 17 nt, Homo sapiens
gaguggcgcgcgccacc

SEQ ID NO: 44212 - RNA, 16 nt, Homo sapiens
gaguggguuucacaag

SEQ ID NO: 44213 - RNA, 18 nt, Homo sapiens
gaguuccuaaccagccug

SEQ ID NO: 44214 - RNA, 16 nt, Homo sapiens
gaguuccuucugcucc

SEQ ID NO: 44215 - RNA, 16 nt, Homo sapiens
gaguucugucuggacu

SEQ ID NO: 44216 - RNA, 17 nt, Homo sapiens
gaguucugucuggacuu

SEQ ID NO: 44217 - RNA, 12 nt, Homo sapiens
gaguuuggccag

SEQ ID NO: 44218 - RNA, 14 nt, Homo sapiens
gaguuuggccagaa

SEQ ID NO: 44219 - RNA, 11 nt, Homo sapiens
gauaaaucagu

SEQ ID NO: 44220 - RNA, 13 nt, Homo sapiens
gauaauaugagaa

SEQ ID NO: 44221 - RNA, 12 nt, Homo sapiens
gauaaugcuaau

SEQ ID NO: 44222 - RNA, 21 nt, Homo sapiens
gauaccucaacccccauuucu

SEQ ID NO: 44223 - RNA, 22 nt, Homo sapiens
gauagagugggacaguuccuga

SEQ ID NO: 44224 - RNA, 17 nt, Homo sapiens
gauagcagggcauggcu

SEQ ID NO: 44225 - RNA, 13 nt, Homo sapiens
gauaggccauggg

SEQ ID NO: 44226 - RNA, 15 nt, Homo sapiens
gauauaaaagacuga

SEQ ID NO: 44227 - RNA, 15 nt, Homo sapiens
gauaucaugccccug

SEQ ID NO: 44228 - RNA, 18 nt, Homo sapiens
gauaucaugccccuguac

SEQ ID NO: 44229 - RNA, 15 nt, Homo sapiens
gauaucccaggaaaa

SEQ ID NO: 44230 - RNA, 12 nt, Homo sapiens
gauaugauucaa

SEQ ID NO: 44231 - RNA, 15 nt, Homo sapiens
gauaugccuuuuccc

SEQ ID NO: 44232 - RNA, 19 nt, Homo sapiens
gauauucucuagucauuug

SEQ ID NO: 44233 - RNA, 20 nt, Homo sapiens
gauauuuauugauguuuuca

SEQ ID NO: 44234 - RNA, 22 nt, Homo sapiens
gaucaaguuauuuuuaauuugg

SEQ ID NO: 44235 - RNA, 21 nt, Homo sapiens
gaucaguaugaaaaugucauu

SEQ ID NO: 44236 - RNA, 13 nt, Homo sapiens
gaucauugugaag

SEQ ID NO: 44237 - RNA, 19 nt, Homo sapiens
gaucauuucaaaacucauu

SEQ ID NO: 44238 - RNA, 21 nt, Homo sapiens
gaucauuucaaaacucauuuc

SEQ ID NO: 44239 - RNA, 21 nt, Homo sapiens
gauccccguguuacugccuau

SEQ ID NO: 44240 - RNA, 22 nt, Homo sapiens
gauccgcccaucuccgucuccc

SEQ ID NO: 44241 - RNA, 23 nt, Homo sapiens
gauccgcccaucuccgucuccca

SEQ ID NO: 44242 - RNA, 14 nt, Homo sapiens
gauccuggaaauca

SEQ ID NO: 44243 - RNA, 17 nt, Homo sapiens
gaucuggggcucuggga

SEQ ID NO: 44244 - RNA, 15 nt, Homo sapiens
gaucuuuaaaauaca

SEQ ID NO: 44245 - RNA, 11 nt, Homo sapiens
gaugaacuuuu

SEQ ID NO: 44246 - RNA, 11 nt, Homo sapiens
gaugaagaagu

SEQ ID NO: 44247 - RNA, 12 nt, Homo sapiens
gaugaagaaguu

SEQ ID NO: 44248 - RNA, 15 nt, Homo sapiens
gaugaaugucaguug

SEQ ID NO: 44249 - RNA, 15 nt, Homo sapiens
gaugaucuuuaaaau

SEQ ID NO: 44250 - RNA, 22 nt, Homo sapiens
gaugaucuuuaaaauacacacu

SEQ ID NO: 44251 - RNA, 13 nt, Homo sapiens
gaugauguuucgu

SEQ ID NO: 44252 - RNA, 16 nt, Homo sapiens
gaugcaguucugaaga

SEQ ID NO: 44253 - RNA, 12 nt, Homo sapiens
gaugcccacggc

SEQ ID NO: 44254 - RNA, 13 nt, Homo sapiens
gaugcccacggcu

SEQ ID NO: 44255 - RNA, 16 nt, Homo sapiens
gaugcccacggcugga

SEQ ID NO: 44256 - RNA, 21 nt, Homo sapiens
gaugccccagggaccuuugua

SEQ ID NO: 44257 - RNA, 22 nt, Homo sapiens
gauggaaguugcagugagcuga

SEQ ID NO: 44258 - RNA, 20 nt, Homo sapiens
gauggcaggaggcauccaaa

SEQ ID NO: 44259 - RNA, 19 nt, Homo sapiens
gaugggagaaucacuugaa

SEQ ID NO: 44260 - RNA, 20 nt, Homo sapiens
gaugggagaaucacuugaac

SEQ ID NO: 44261 - RNA, 23 nt, Homo sapiens
gauggguuugacaagguucuucc

SEQ ID NO: 44262 - RNA, 17 nt, Homo sapiens
gaugguucccuugauga

SEQ ID NO: 44263 - RNA, 21 nt, Homo sapiens
gaugguucccuugaugaagaa

SEQ ID NO: 44264 - RNA, 23 nt, Homo sapiens
gauguuuagaaacacaacuauau

SEQ ID NO: 44265 - RNA, 15 nt, Homo sapiens
gauguuucauaagaa

SEQ ID NO: 44266 - RNA, 12 nt, Homo sapiens
gauuaaacuuaa

SEQ ID NO: 44267 - RNA, 13 nt, Homo sapiens
gauuaaacuuaau

SEQ ID NO: 44268 - RNA, 18 nt, Homo sapiens
gauuaacucuaccugcac

SEQ ID NO: 44269 - RNA, 18 nt, Homo sapiens
gauuacccucugggucuc

SEQ ID NO: 44270 - RNA, 20 nt, Homo sapiens
gauuauauauauuuuuuucu

SEQ ID NO: 44271 - RNA, 13 nt, Homo sapiens
gauucaauuuuaa

SEQ ID NO: 44272 - RNA, 23 nt, Homo sapiens
gauuccaccuacaugagguacug

SEQ ID NO: 44273 - RNA, 15 nt, Homo sapiens
gauucccagccagca

SEQ ID NO: 44274 - RNA, 18 nt, Homo sapiens
gauucccagccagcacag

SEQ ID NO: 44275 - RNA, 16 nt, Homo sapiens
gauucccugagcagga

SEQ ID NO: 44276 - RNA, 16 nt, Homo sapiens
gauuccucacuuugaa

SEQ ID NO: 44277 - RNA, 13 nt, Homo sapiens
gauucuauguuaa

SEQ ID NO: 44278 - RNA, 21 nt, Homo sapiens
gauucucuuuauucagccccg

SEQ ID NO: 44279 - RNA, 18 nt, Homo sapiens
gauugagaaggagcuccc

SEQ ID NO: 44280 - RNA, 20 nt, Homo sapiens
gauugugccccugcacucca

SEQ ID NO: 44281 - RNA, 20 nt, Homo sapiens
gauugugggauacuauuuaa

SEQ ID NO: 44282 - RNA, 15 nt, Homo sapiens
gauuuaacagaaaug

SEQ ID NO: 44283 - RNA, 14 nt, Homo sapiens
gauuucaugccugg

SEQ ID NO: 44284 - RNA, 23 nt, Homo sapiens
gauuucaugccuggugcuuccaa

SEQ ID NO: 44285 - RNA, 12 nt, Homo sapiens
gauuucauucaa

SEQ ID NO: 44286 - RNA, 15 nt, Homo sapiens
gauuucuguuuagau

SEQ ID NO: 44287 - RNA, 15 nt, Homo sapiens
gauuuguaauauuuc

SEQ ID NO: 44288 - RNA, 16 nt, Homo sapiens
gauuuuaugcuuuaaa

SEQ ID NO: 44289 - RNA, 16 nt, Homo sapiens
gauuuugcuguagaag

SEQ ID NO: 44290 - RNA, 20 nt, Homo sapiens
gcaaaauuuuuucucuagga

SEQ ID NO: 44291 - RNA, 23 nt, Homo sapiens
gcaaagacuaugaggaauauuug

SEQ ID NO: 44292 - RNA, 20 nt, Homo sapiens
gcaaaguaucccuacuguaa

SEQ ID NO: 44293 - RNA, 14 nt, Homo sapiens
gcaaaugagccgga

SEQ ID NO: 44294 - RNA, 17 nt, Homo sapiens
gcaaauggccaaugaga

SEQ ID NO: 44295 - RNA, 16 nt, Homo sapiens
gcaaauguuaugcaua

SEQ ID NO: 44296 - RNA, 16 nt, Homo sapiens
gcaaauuccaauacau

SEQ ID NO: 44297 - RNA, 17 nt, Homo sapiens
gcaaauuccaauacauu

SEQ ID NO: 44298 - RNA, 22 nt, Homo sapiens
gcaaauugucacaggacagccc

SEQ ID NO: 44299 - RNA, 20 nt, Homo sapiens
gcaacaugccagccacugug

SEQ ID NO: 44300 - RNA, 21 nt, Homo sapiens
gcaacaugccagccacuguga

SEQ ID NO: 44301 - RNA, 11 nt, Homo sapiens
gcaacccaaau

SEQ ID NO: 44302 - RNA, 19 nt, Homo sapiens
gcaaccccaucauccucag

SEQ ID NO: 44303 - RNA, 12 nt, Homo sapiens
gcaaccuccacc

SEQ ID NO: 44304 - RNA, 15 nt, Homo sapiens
gcaaccuccaccuuc

SEQ ID NO: 44305 - RNA, 17 nt, Homo sapiens
gcaaccuccaccuucug

SEQ ID NO: 44306 - RNA, 19 nt, Homo sapiens
gcaaccuccaccuucuggg

SEQ ID NO: 44307 - RNA, 20 nt, Homo sapiens
gcaaccuccaccuucugggu

SEQ ID NO: 44308 - RNA, 19 nt, Homo sapiens
gcaaccuuuggaugcacuu

SEQ ID NO: 44309 - RNA, 23 nt, Homo sapiens
gcaacgcaggcccccaggugcca

SEQ ID NO: 44310 - RNA, 23 nt, Homo sapiens
gcacacucucccauuauauuuau

SEQ ID NO: 44311 - RNA, 21 nt, Homo sapiens
gcacagccucuuagaugcagu

SEQ ID NO: 44312 - RNA, 17 nt, Homo sapiens
gcacaucuguuuuguaa

SEQ ID NO: 44313 - RNA, 13 nt, Homo sapiens
gcaccaaucauga

SEQ ID NO: 44314 - RNA, 20 nt, Homo sapiens
gcaccgcuguacgcgagcgc

SEQ ID NO: 44315 - RNA, 11 nt, Homo sapiens
gcaccugcagg

SEQ ID NO: 44316 - RNA, 17 nt, Homo sapiens
gcaccuguaaucccagc

SEQ ID NO: 44317 - RNA, 17 nt, Homo sapiens
gcaccugugccgucccc

SEQ ID NO: 44318 - RNA, 21 nt, Homo sapiens
gcaccuuuagaauauuaaaaa

SEQ ID NO: 44319 - RNA, 14 nt, Homo sapiens
gcacgauuucuguu

SEQ ID NO: 44320 - RNA, 15 nt, Homo sapiens
gcacuaaucaauacu

SEQ ID NO: 44321 - RNA, 16 nt, Homo sapiens
gcacuaaucaauacuu

SEQ ID NO: 44322 - RNA, 17 nt, Homo sapiens
gcacuaguauuucuaug

SEQ ID NO: 44323 - RNA, 22 nt, Homo sapiens
gcacuaguauuucuaugaaaua

SEQ ID NO: 44324 - RNA, 14 nt, Homo sapiens
gcacuccagccuga

SEQ ID NO: 44325 - RNA, 18 nt, Homo sapiens
gcacuccagccugagcga

SEQ ID NO: 44326 - RNA, 14 nt, Homo sapiens
gcacuuacaauuuu

SEQ ID NO: 44327 - RNA, 20 nt, Homo sapiens
gcacuuauuuauuguuguug

SEQ ID NO: 44328 - RNA, 21 nt, Homo sapiens
gcacuuauuuauuguuguugg

SEQ ID NO: 44329 - RNA, 15 nt, Homo sapiens
gcacuugggacaaaa

SEQ ID NO: 44330 - RNA, 16 nt, Homo sapiens
gcacuuuaaacauuua

SEQ ID NO: 44331 - RNA, 18 nt, Homo sapiens
gcacuuuaacacaguguc

SEQ ID NO: 44332 - RNA, 20 nt, Homo sapiens
gcacuuucccucuuggugcc

SEQ ID NO: 44333 - RNA, 22 nt, Homo sapiens
gcacuuucccucuuggugccuc

SEQ ID NO: 44334 - RNA, 17 nt, Homo sapiens
gcacuuugggaggcuga

SEQ ID NO: 44335 - RNA, 12 nt, Homo sapiens
gcagaacaguga

SEQ ID NO: 44336 - RNA, 14 nt, Homo sapiens
gcagaagacaguau

SEQ ID NO: 44337 - RNA, 17 nt, Homo sapiens
gcagaagcaacccaaau

SEQ ID NO: 44338 - RNA, 14 nt, Homo sapiens
gcagacucugguca

SEQ ID NO: 44339 - RNA, 20 nt, Homo sapiens
gcagagacgggguuugccau

SEQ ID NO: 44340 - RNA, 22 nt, Homo sapiens
gcagagagguuucgauauuuau

SEQ ID NO: 44341 - RNA, 19 nt, Homo sapiens
gcagagguugcagugagcc

SEQ ID NO: 44342 - RNA, 13 nt, Homo sapiens
gcagauaaacagu

SEQ ID NO: 44343 - RNA, 23 nt, Homo sapiens
gcagauguaauagaaauaaaccu

SEQ ID NO: 44344 - RNA, 19 nt, Homo sapiens
gcagauuuaagauauguaa

SEQ ID NO: 44345 - RNA, 23 nt, Homo sapiens
gcagauuucuuuccauugugggc

SEQ ID NO: 44346 - RNA, 23 nt, Homo sapiens
gcagccaaccuaagcaagauccc

SEQ ID NO: 44347 - RNA, 22 nt, Homo sapiens
gcagccaugugauuacccucug

SEQ ID NO: 44348 - RNA, 20 nt, Homo sapiens
gcagcccugcugcugccugc

SEQ ID NO: 44349 - RNA, 21 nt, Homo sapiens
gcagcgaguacuucccgcugu

SEQ ID NO: 44350 - RNA, 22 nt, Homo sapiens
gcagcgaguacuucccgcuguu

SEQ ID NO: 44351 - RNA, 14 nt, Homo sapiens
gcagcucaggcugg

SEQ ID NO: 44352 - RNA, 20 nt, Homo sapiens
gcagcucaggcuggcaccgc

SEQ ID NO: 44353 - RNA, 22 nt, Homo sapiens
gcagcucuaaaugucaaucagc

SEQ ID NO: 44354 - RNA, 14 nt, Homo sapiens
gcagcuuauucaca

SEQ ID NO: 44355 - RNA, 17 nt, Homo sapiens
gcaggaccaucccggcc

SEQ ID NO: 44356 - RNA, 19 nt, Homo sapiens
gcaggaccaucccggccgg

SEQ ID NO: 44357 - RNA, 20 nt, Homo sapiens
gcaggaccaucccggccggc

SEQ ID NO: 44358 - RNA, 18 nt, Homo sapiens
gcaggauagagugggaca

SEQ ID NO: 44359 - RNA, 12 nt, Homo sapiens
gcaggcagcagg

SEQ ID NO: 44360 - RNA, 13 nt, Homo sapiens
gcaggcaucgcca

SEQ ID NO: 44361 - RNA, 18 nt, Homo sapiens
gcaggcccccaggugcca

SEQ ID NO: 44362 - RNA, 12 nt, Homo sapiens
gcaggcgugacc

SEQ ID NO: 44363 - RNA, 13 nt, Homo sapiens
gcaggcgugaccu

SEQ ID NO: 44364 - RNA, 14 nt, Homo sapiens
gcaggcgugaccug

SEQ ID NO: 44365 - RNA, 22 nt, Homo sapiens
gcaggcgugaccugacagccca

SEQ ID NO: 44366 - RNA, 23 nt, Homo sapiens
gcaggcgugaccugacagcccaa

SEQ ID NO: 44367 - RNA, 13 nt, Homo sapiens
gcagggacuugaa

SEQ ID NO: 44368 - RNA, 18 nt, Homo sapiens
gcagggugaacugcagcg

SEQ ID NO: 44369 - RNA, 17 nt, Homo sapiens
gcaggucacacaaccug

SEQ ID NO: 44370 - RNA, 19 nt, Homo sapiens
gcaggucacacaaccuguc

SEQ ID NO: 44371 - RNA, 13 nt, Homo sapiens
gcagugaggcgga

SEQ ID NO: 44372 - RNA, 12 nt, Homo sapiens
gcagugcuuggc

SEQ ID NO: 44373 - RNA, 14 nt, Homo sapiens
gcagugcuuggccc

SEQ ID NO: 44374 - RNA, 16 nt, Homo sapiens
gcagugcuuggcccag

SEQ ID NO: 44375 - RNA, 19 nt, Homo sapiens
gcagugcuuggcccaggag

SEQ ID NO: 44376 - RNA, 19 nt, Homo sapiens
gcaguggugguuuucuguu

SEQ ID NO: 44377 - RNA, 18 nt, Homo sapiens
gcaguucugaagaagaug

SEQ ID NO: 44378 - RNA, 17 nt, Homo sapiens
gcaguuguugcccacag

SEQ ID NO: 44379 - RNA, 17 nt, Homo sapiens
gcauacugccuuguuua

SEQ ID NO: 44380 - RNA, 18 nt, Homo sapiens
gcauaguaccucugcuau

SEQ ID NO: 44381 - RNA, 19 nt, Homo sapiens
gcauaguaccucugcuauu

SEQ ID NO: 44382 - RNA, 22 nt, Homo sapiens
gcauaguaccucugcuauuugc

SEQ ID NO: 44383 - RNA, 18 nt, Homo sapiens
gcauauugauaauaaaau

SEQ ID NO: 44384 - RNA, 12 nt, Homo sapiens
gcauauuuuauu

SEQ ID NO: 44385 - RNA, 21 nt, Homo sapiens
gcaucaauuuuucuuauuuca

SEQ ID NO: 44386 - RNA, 14 nt, Homo sapiens
gcaucacaguuuug

SEQ ID NO: 44387 - RNA, 23 nt, Homo sapiens
gcaucagcugcugaaacaacaaa

SEQ ID NO: 44388 - RNA, 12 nt, Homo sapiens
gcaucaugcauc

SEQ ID NO: 44389 - RNA, 14 nt, Homo sapiens
gcauccuagucucu

SEQ ID NO: 44390 - RNA, 16 nt, Homo sapiens
gcauccuagucucuau

SEQ ID NO: 44391 - RNA, 21 nt, Homo sapiens
gcauccuagucucuaucauua

SEQ ID NO: 44392 - RNA, 16 nt, Homo sapiens
gcaucucauuuauaau

SEQ ID NO: 44393 - RNA, 15 nt, Homo sapiens
gcaucucugaacauu

SEQ ID NO: 44394 - RNA, 16 nt, Homo sapiens
gcaucucugaacauuu

SEQ ID NO: 44395 - RNA, 19 nt, Homo sapiens
gcaugggccuagcccacug

SEQ ID NO: 44396 - RNA, 20 nt, Homo sapiens
gcaugggccuagcccacugg

SEQ ID NO: 44397 - RNA, 19 nt, Homo sapiens
gcaugguggcgcgcaccug

SEQ ID NO: 44398 - RNA, 19 nt, Homo sapiens
gcauguaugacgugacugg

SEQ ID NO: 44399 - RNA, 20 nt, Homo sapiens
gcauguaugacgugacuggc

SEQ ID NO: 44400 - RNA, 21 nt, Homo sapiens
gcaugucagacagaacuugaa

SEQ ID NO: 44401 - RNA, 24 nt, Homo sapiens
gcauuauauuuauuacuguaagaa

SEQ ID NO: 44402 - RNA, 16 nt, Homo sapiens
gcauuaucuagauacu

SEQ ID NO: 44403 - RNA, 14 nt, Homo sapiens
gcauucaaauguau

SEQ ID NO: 44404 - RNA, 14 nt, Homo sapiens
gcauuccaacuauc

SEQ ID NO: 44405 - RNA, 16 nt, Homo sapiens
gcauuguaacuuauga

SEQ ID NO: 44406 - RNA, 17 nt, Homo sapiens
gcauuguaacuuaugaa

SEQ ID NO: 44407 - RNA, 14 nt, Homo sapiens
gcauuuaauuuauu

SEQ ID NO: 44408 - RNA, 19 nt, Homo sapiens
gcauuuggugguuucagaa

SEQ ID NO: 44409 - RNA, 15 nt, Homo sapiens
gcauuuguuugaacu

SEQ ID NO: 44410 - RNA, 15 nt, Homo sapiens
gccaaccugggggcu

SEQ ID NO: 44411 - RNA, 20 nt, Homo sapiens
gccaacuggggugggugggg

SEQ ID NO: 44412 - RNA, 21 nt, Homo sapiens
gccaacugggguggguggggc

SEQ ID NO: 44413 - RNA, 22 nt, Homo sapiens
gccaacugggguggguggggca

SEQ ID NO: 44414 - RNA, 23 nt, Homo sapiens
gccaacugggguggguggggcag

SEQ ID NO: 44415 - RNA, 11 nt, Homo sapiens
gccaaggcugg

SEQ ID NO: 44416 - RNA, 13 nt, Homo sapiens
gccaaggcuggag

SEQ ID NO: 44417 - RNA, 15 nt, Homo sapiens
gccaaggcuggagug

SEQ ID NO: 44418 - RNA, 19 nt, Homo sapiens
gccaaggcuggagugcagu

SEQ ID NO: 44419 - RNA, 23 nt, Homo sapiens
gccaaggcuggagugcaguggcg

SEQ ID NO: 44420 - RNA, 12 nt, Homo sapiens
gccaauuuacuu

SEQ ID NO: 44421 - RNA, 16 nt, Homo sapiens
gccaccaaacccggcc

SEQ ID NO: 44422 - RNA, 13 nt, Homo sapiens
gccaccacgccca

SEQ ID NO: 44423 - RNA, 15 nt, Homo sapiens
gccaccacgcccagc

SEQ ID NO: 44424 - RNA, 16 nt, Homo sapiens
gccaccacgcccagcu

SEQ ID NO: 44425 - RNA, 15 nt, Homo sapiens
gccaccuccugccuc

SEQ ID NO: 44426 - RNA, 11 nt, Homo sapiens
gccacgcucug

SEQ ID NO: 44427 - RNA, 16 nt, Homo sapiens
gccacgcucugggucg

SEQ ID NO: 44428 - RNA, 19 nt, Homo sapiens
gccacgcucugggucgccg

SEQ ID NO: 44429 - RNA, 20 nt, Homo sapiens
gccacgcucugggucgccgg

SEQ ID NO: 44430 - RNA, 20 nt, Homo sapiens
gccacugugauagaggcuga

SEQ ID NO: 44431 - RNA, 13 nt, Homo sapiens
gccacuucacuuu

SEQ ID NO: 44432 - RNA, 13 nt, Homo sapiens
gccagaagucaag

SEQ ID NO: 44433 - RNA, 18 nt, Homo sapiens
gccagacaucaacagaua

SEQ ID NO: 44434 - RNA, 18 nt, Homo sapiens
gccagacuggcacaguuu

SEQ ID NO: 44435 - RNA, 13 nt, Homo sapiens
gccagcaaauucg

SEQ ID NO: 44436 - RNA, 14 nt, Homo sapiens
gccagcaaauucgc

SEQ ID NO: 44437 - RNA, 18 nt, Homo sapiens
gccagcccucuucugaca

SEQ ID NO: 44438 - RNA, 12 nt, Homo sapiens
gccaggcggcug

SEQ ID NO: 44439 - RNA, 14 nt, Homo sapiens
gccagguaccuucu

SEQ ID NO: 44440 - RNA, 23 nt, Homo sapiens
gccagugcuuuaauggcauguca

SEQ ID NO: 44441 - RNA, 18 nt, Homo sapiens
gccauaauuacuauguca

SEQ ID NO: 44442 - RNA, 20 nt, Homo sapiens
gccauaauuacuaugucauu

SEQ ID NO: 44443 - RNA, 18 nt, Homo sapiens
gccauagucauucugccu

SEQ ID NO: 44444 - RNA, 21 nt, Homo sapiens
gccauagucauucugccugcc

SEQ ID NO: 44445 - RNA, 12 nt, Homo sapiens
gccaucauuuac

SEQ ID NO: 44446 - RNA, 17 nt, Homo sapiens
gccaugcuggccaggcu

SEQ ID NO: 44447 - RNA, 18 nt, Homo sapiens
gccaugcuggccaggcug

SEQ ID NO: 44448 - RNA, 19 nt, Homo sapiens
gccaugcuggccaggcugg

SEQ ID NO: 44449 - RNA, 21 nt, Homo sapiens
gccaugcuggccaggcugguc

SEQ ID NO: 44450 - RNA, 23 nt, Homo sapiens
gccaugcuggccaggcuggucuc

SEQ ID NO: 44451 - RNA, 20 nt, Homo sapiens
gccauggagguuaagcacuu

SEQ ID NO: 44452 - RNA, 16 nt, Homo sapiens
gccaugugcuaguaau

SEQ ID NO: 44453 - RNA, 13 nt, Homo sapiens
gccauucuugcug

SEQ ID NO: 44454 - RNA, 23 nt, Homo sapiens
gcccaacuguuauagguuguugg

SEQ ID NO: 44455 - RNA, 19 nt, Homo sapiens
gcccaaggguggguggggu

SEQ ID NO: 44456 - RNA, 21 nt, Homo sapiens
gcccaagggugggugggguga

SEQ ID NO: 44457 - RNA, 16 nt, Homo sapiens
gcccaccgcaggguga

SEQ ID NO: 44458 - RNA, 13 nt, Homo sapiens
gcccacggcugga

SEQ ID NO: 44459 - RNA, 18 nt, Homo sapiens
gcccacggcuggagcugc

SEQ ID NO: 44460 - RNA, 18 nt, Homo sapiens
gcccacuuccucccggcc

SEQ ID NO: 44461 - RNA, 22 nt, Homo sapiens
gcccacuuccucccggccgcgc

SEQ ID NO: 44462 - RNA, 17 nt, Homo sapiens
gcccaggaguuuggcca

SEQ ID NO: 44463 - RNA, 18 nt, Homo sapiens
gcccaggaguuuggccag

SEQ ID NO: 44464 - RNA, 22 nt, Homo sapiens
gcccaggaguuuggccagaagu

SEQ ID NO: 44465 - RNA, 16 nt, Homo sapiens
gcccauccugccccug

SEQ ID NO: 44466 - RNA, 20 nt, Homo sapiens
gcccauccugccccugagcc

SEQ ID NO: 44467 - RNA, 22 nt, Homo sapiens
gcccauccugccccugagccca

SEQ ID NO: 44468 - RNA, 16 nt, Homo sapiens
gcccaucuccgucucc

SEQ ID NO: 44469 - RNA, 13 nt, Homo sapiens
gccccaauucgau

SEQ ID NO: 44470 - RNA, 15 nt, Homo sapiens
gccccaauucgaucc

SEQ ID NO: 44471 - RNA, 14 nt, Homo sapiens
gccccaggcggguc

SEQ ID NO: 44472 - RNA, 15 nt, Homo sapiens
gccccaucugguccu

SEQ ID NO: 44473 - RNA, 16 nt, Homo sapiens
gccccaucugguccua

SEQ ID NO: 44474 - RNA, 18 nt, Homo sapiens
gcccccauuguggucaca

SEQ ID NO: 44475 - RNA, 11 nt, Homo sapiens
gcccccgggcc

SEQ ID NO: 44476 - RNA, 12 nt, Homo sapiens
gcccccgggccg

SEQ ID NO: 44477 - RNA, 13 nt, Homo sapiens
gcccccgggccga

SEQ ID NO: 44478 - RNA, 17 nt, Homo sapiens
gcccccgggccgacgga

SEQ ID NO: 44479 - RNA, 19 nt, Homo sapiens
gcccccgggccgacggagc

SEQ ID NO: 44480 - RNA, 21 nt, Homo sapiens
gcccccgggccgacggagccg

SEQ ID NO: 44481 - RNA, 12 nt, Homo sapiens
gccccgggagug

SEQ ID NO: 44482 - RNA, 14 nt, Homo sapiens
gccccgggaguggc

SEQ ID NO: 44483 - RNA, 12 nt, Homo sapiens
gccccggggagg

SEQ ID NO: 44484 - RNA, 14 nt, Homo sapiens
gccccggggagggg

SEQ ID NO: 44485 - RNA, 17 nt, Homo sapiens
gccccggggaggggcgc

SEQ ID NO: 44486 - RNA, 19 nt, Homo sapiens
gccccggggaggggcgcuc

SEQ ID NO: 44487 - RNA, 20 nt, Homo sapiens
gccccggggaggggcgcucg

SEQ ID NO: 44488 - RNA, 21 nt, Homo sapiens
gccccggggaggggcgcucgc

SEQ ID NO: 44489 - RNA, 22 nt, Homo sapiens
gccccggggaggggcgcucgcu

SEQ ID NO: 44490 - RNA, 18 nt, Homo sapiens
gccccgugggguuccucc

SEQ ID NO: 44491 - RNA, 11 nt, Homo sapiens
gccccugagcc

SEQ ID NO: 44492 - RNA, 12 nt, Homo sapiens
gccccugagccc

SEQ ID NO: 44493 - RNA, 13 nt, Homo sapiens
gccccugagccca

SEQ ID NO: 44494 - RNA, 17 nt, Homo sapiens
gccccugcacuccagcc

SEQ ID NO: 44495 - RNA, 21 nt, Homo sapiens
gccccugcacuccagccugag

SEQ ID NO: 44496 - RNA, 22 nt, Homo sapiens
gccccugccaccuccugccuca

SEQ ID NO: 44497 - RNA, 12 nt, Homo sapiens
gccccuugggca

SEQ ID NO: 44498 - RNA, 13 nt, Homo sapiens
gccccuugggcag

SEQ ID NO: 44499 - RNA, 16 nt, Homo sapiens
gcccucuggcugcugg

SEQ ID NO: 44500 - RNA, 21 nt, Homo sapiens
gcccugaaagucccagaucaa

SEQ ID NO: 44501 - RNA, 14 nt, Homo sapiens
gcccugccaugcuc

SEQ ID NO: 44502 - RNA, 16 nt, Homo sapiens
gcccugccaugcucuc

SEQ ID NO: 44503 - RNA, 14 nt, Homo sapiens
gcccugcuuuugcu

SEQ ID NO: 44504 - RNA, 16 nt, Homo sapiens
gcccuggccuagcaua

SEQ ID NO: 44505 - RNA, 13 nt, Homo sapiens
gcccugugcggcc

SEQ ID NO: 44506 - RNA, 14 nt, Homo sapiens
gcccugugcggccu

SEQ ID NO: 44507 - RNA, 16 nt, Homo sapiens
gcccugugcggccugg

SEQ ID NO: 44508 - RNA, 17 nt, Homo sapiens
gcccugugcggccuggu

SEQ ID NO: 44509 - RNA, 18 nt, Homo sapiens
gcccugugcggccugguc

SEQ ID NO: 44510 - RNA, 19 nt, Homo sapiens
gcccugugcggccuggucu

SEQ ID NO: 44511 - RNA, 18 nt, Homo sapiens
gcccuuacguccuuccac

SEQ ID NO: 44512 - RNA, 19 nt, Homo sapiens
gcccuuacguccuuccacu

SEQ ID NO: 44513 - RNA, 13 nt, Homo sapiens
gcccuucauguac

SEQ ID NO: 44514 - RNA, 17 nt, Homo sapiens
gcccuuccccuucccac

SEQ ID NO: 44515 - RNA, 23 nt, Homo sapiens
gcccuuccccuucccacacuguc

SEQ ID NO: 44516 - RNA, 12 nt, Homo sapiens
gccgacggagcc

SEQ ID NO: 44517 - RNA, 14 nt, Homo sapiens
gccgacggagccgg

SEQ ID NO: 44518 - RNA, 15 nt, Homo sapiens
gccgacggagccggg

SEQ ID NO: 44519 - RNA, 17 nt, Homo sapiens
gccgacggagccgggaa

SEQ ID NO: 44520 - RNA, 21 nt, Homo sapiens
gccgacggagccgggaaagaa

SEQ ID NO: 44521 - RNA, 15 nt, Homo sapiens
gccgagauugugccc

SEQ ID NO: 44522 - RNA, 19 nt, Homo sapiens
gccgcgcuccucggacggc

SEQ ID NO: 44523 - RNA, 21 nt, Homo sapiens
gccgcgcuccucggacggcuc

SEQ ID NO: 44524 - RNA, 22 nt, Homo sapiens
gccgcgcuccucggacggcucc

SEQ ID NO: 44525 - RNA, 13 nt, Homo sapiens
gccgcgcugcgcg

SEQ ID NO: 44526 - RNA, 14 nt, Homo sapiens
gccgcgcugcgcgc

SEQ ID NO: 44527 - RNA, 15 nt, Homo sapiens
gccgcgcugcgcgcc

SEQ ID NO: 44528 - RNA, 16 nt, Homo sapiens
gccgcgcugcgcgccg

SEQ ID NO: 44529 - RNA, 18 nt, Homo sapiens
gccgcgcugcgcgccgcg

SEQ ID NO: 44530 - RNA, 19 nt, Homo sapiens
gccgcgcugcgcgccgcgc

SEQ ID NO: 44531 - RNA, 20 nt, Homo sapiens
gccgcgcugcgcgccgcgcu

SEQ ID NO: 44532 - RNA, 15 nt, Homo sapiens
gccgcuuaagcuuuc

SEQ ID NO: 44533 - RNA, 14 nt, Homo sapiens
gccggagccccuug

SEQ ID NO: 44534 - RNA, 24 nt, Homo sapiens
gccggagccccuugggcaggucac

SEQ ID NO: 44535 - RNA, 13 nt, Homo sapiens
gccggagccucca

SEQ ID NO: 44536 - RNA, 14 nt, Homo sapiens
gccggagccuccag

SEQ ID NO: 44537 - RNA, 15 nt, Homo sapiens
gccggagccuccagc

SEQ ID NO: 44538 - RNA, 18 nt, Homo sapiens
gccggagccuccagcugc

SEQ ID NO: 44539 - RNA, 20 nt, Homo sapiens
gccggagccuccagcugccc

SEQ ID NO: 44540 - RNA, 21 nt, Homo sapiens
gccggagccuccagcugcccc

SEQ ID NO: 44541 - RNA, 22 nt, Homo sapiens
gccggagccuccagcugccccg

SEQ ID NO: 44542 - RNA, 23 nt, Homo sapiens
gccggagccuccagcugccccgg

SEQ ID NO: 44543 - RNA, 12 nt, Homo sapiens
gccggcgcgcuc

SEQ ID NO: 44544 - RNA, 14 nt, Homo sapiens
gccggcgcgcucau

SEQ ID NO: 44545 - RNA, 23 nt, Homo sapiens
gccggcgcgcucaucccacccgc

SEQ ID NO: 44546 - RNA, 18 nt, Homo sapiens
gccgggaaagaagagccg

SEQ ID NO: 44547 - RNA, 19 nt, Homo sapiens
gccgggaaagaagagccgg

SEQ ID NO: 44548 - RNA, 20 nt, Homo sapiens
gccgggaaagaagagccgga

SEQ ID NO: 44549 - RNA, 21 nt, Homo sapiens
gccgggaaagaagagccggag

SEQ ID NO: 44550 - RNA, 15 nt, Homo sapiens
gccgggcgcgguggc

SEQ ID NO: 44551 - RNA, 18 nt, Homo sapiens
gccgggcgcgguggcuca

SEQ ID NO: 44552 - RNA, 17 nt, Homo sapiens
gccgggcguggugguga

SEQ ID NO: 44553 - RNA, 15 nt, Homo sapiens
gccgguccuugcugc

SEQ ID NO: 44554 - RNA, 16 nt, Homo sapiens
gccgguccuugcugca

SEQ ID NO: 44555 - RNA, 17 nt, Homo sapiens
gccgguccuugcugcac

SEQ ID NO: 44556 - RNA, 20 nt, Homo sapiens
gccguccccagagcuacagg

SEQ ID NO: 44557 - RNA, 12 nt, Homo sapiens
gccgugggccug

SEQ ID NO: 44558 - RNA, 23 nt, Homo sapiens
gccgugggccugagaccaaggcc

SEQ ID NO: 44559 - RNA, 16 nt, Homo sapiens
gccuaagugcagcccc

SEQ ID NO: 44560 - RNA, 17 nt, Homo sapiens
gccuaagugcagccccg

SEQ ID NO: 44561 - RNA, 16 nt, Homo sapiens
gccuaucagcauuuua

SEQ ID NO: 44562 - RNA, 23 nt, Homo sapiens
gccucaaucaguauucauauuua

SEQ ID NO: 44563 - RNA, 14 nt, Homo sapiens
gccucaccccuugc

SEQ ID NO: 44564 - RNA, 15 nt, Homo sapiens
gccucaccccuugcc

SEQ ID NO: 44565 - RNA, 20 nt, Homo sapiens
gccucagaaaacaaggauga

SEQ ID NO: 44566 - RNA, 11 nt, Homo sapiens
gccucagcucu

SEQ ID NO: 44567 - RNA, 13 nt, Homo sapiens
gccucagcucuca

SEQ ID NO: 44568 - RNA, 15 nt, Homo sapiens
gccuccagcugcccc

SEQ ID NO: 44569 - RNA, 16 nt, Homo sapiens
gccuccagcugccccg

SEQ ID NO: 44570 - RNA, 17 nt, Homo sapiens
gccuccagcugccccgg

SEQ ID NO: 44571 - RNA, 18 nt, Homo sapiens
gccuccagcugccccggg

SEQ ID NO: 44572 - RNA, 20 nt, Homo sapiens
gccuccagcugccccgggga

SEQ ID NO: 44573 - RNA, 12 nt, Homo sapiens
gccuccgcuacu

SEQ ID NO: 44574 - RNA, 20 nt, Homo sapiens
gccuccgcuacuuccagggc

SEQ ID NO: 44575 - RNA, 13 nt, Homo sapiens
gccuccucucuca

SEQ ID NO: 44576 - RNA, 23 nt, Homo sapiens
gccucuauugccaugagaguucu

SEQ ID NO: 44577 - RNA, 18 nt, Homo sapiens
gccugaaagaggaaugaa

SEQ ID NO: 44578 - RNA, 19 nt, Homo sapiens
gccugaaagaggaaugaag

SEQ ID NO: 44579 - RNA, 15 nt, Homo sapiens
gccugagaccaaggc

SEQ ID NO: 44580 - RNA, 16 nt, Homo sapiens
gccugagaccaaggcc

SEQ ID NO: 44581 - RNA, 21 nt, Homo sapiens
gccugagaccaaggcccccgg

SEQ ID NO: 44582 - RNA, 17 nt, Homo sapiens
gccugagcggaccuucc

SEQ ID NO: 44583 - RNA, 14 nt, Homo sapiens
gccugcaauauuug

SEQ ID NO: 44584 - RNA, 12 nt, Homo sapiens
gccugcucgccc

SEQ ID NO: 44585 - RNA, 13 nt, Homo sapiens
gccugcucgccca

SEQ ID NO: 44586 - RNA, 14 nt, Homo sapiens
gccugcucgcccac

SEQ ID NO: 44587 - RNA, 21 nt, Homo sapiens
gccugcucgcccacuuccucc

SEQ ID NO: 44588 - RNA, 22 nt, Homo sapiens
gccugcuggauguggagggggc

SEQ ID NO: 44589 - RNA, 19 nt, Homo sapiens
gccuggauggcugccucac

SEQ ID NO: 44590 - RNA, 11 nt, Homo sapiens
gccuggcuggg

SEQ ID NO: 44591 - RNA, 17 nt, Homo sapiens
gccuggcugggaguggc

SEQ ID NO: 44592 - RNA, 18 nt, Homo sapiens
gccuggcugggaguggca

SEQ ID NO: 44593 - RNA, 12 nt, Homo sapiens
gccugggugaca

SEQ ID NO: 44594 - RNA, 13 nt, Homo sapiens
gccugggugacag

SEQ ID NO: 44595 - RNA, 20 nt, Homo sapiens
gccuggucaacauggugaaa

SEQ ID NO: 44596 - RNA, 18 nt, Homo sapiens
gccuggugcuuccaaaua

SEQ ID NO: 44597 - RNA, 16 nt, Homo sapiens
gccuguaaucccagca

SEQ ID NO: 44598 - RNA, 20 nt, Homo sapiens
gccuguaaucccagcacuuu

SEQ ID NO: 44599 - RNA, 17 nt, Homo sapiens
gccuuggauacuccaug

SEQ ID NO: 44600 - RNA, 18 nt, Homo sapiens
gccuuggggcugaugcag

SEQ ID NO: 44601 - RNA, 16 nt, Homo sapiens
gccuugguauagcaua

SEQ ID NO: 44602 - RNA, 13 nt, Homo sapiens
gcgacagugagac

SEQ ID NO: 44603 - RNA, 14 nt, Homo sapiens
gcgagccccaggcg

SEQ ID NO: 44604 - RNA, 12 nt, Homo sapiens
gcgagcgcgcgc

SEQ ID NO: 44605 - RNA, 13 nt, Homo sapiens
gcgagcgcgcgcg

SEQ ID NO: 44606 - RNA, 14 nt, Homo sapiens
gcgagcgcgcgcgc

SEQ ID NO: 44607 - RNA, 15 nt, Homo sapiens
gcgagcgcgcgcgcc

SEQ ID NO: 44608 - RNA, 17 nt, Homo sapiens
gcgagcgcgcgcgcccu

SEQ ID NO: 44609 - RNA, 17 nt, Homo sapiens
gcgaguacuucccgcug

SEQ ID NO: 44610 - RNA, 18 nt, Homo sapiens
gcgaguacuucccgcugu

SEQ ID NO: 44611 - RNA, 19 nt, Homo sapiens
gcgaguacuucccgcuguu

SEQ ID NO: 44612 - RNA, 21 nt, Homo sapiens
gcgcaaucuuaacucauugca

SEQ ID NO: 44613 - RNA, 13 nt, Homo sapiens
gcgcagccaugug

SEQ ID NO: 44614 - RNA, 16 nt, Homo sapiens
gcgcagcucaggcugg

SEQ ID NO: 44615 - RNA, 12 nt, Homo sapiens
gcgccaccacgc

SEQ ID NO: 44616 - RNA, 13 nt, Homo sapiens
gcgccaccacgcc

SEQ ID NO: 44617 - RNA, 16 nt, Homo sapiens
gcgcccucuggcugcu

SEQ ID NO: 44618 - RNA, 18 nt, Homo sapiens
gcgcccucuggcugcugg

SEQ ID NO: 44619 - RNA, 19 nt, Homo sapiens
gcgcccucuggcugcuggu

SEQ ID NO: 44620 - RNA, 20 nt, Homo sapiens
gcgcccucuggcugcuggug

SEQ ID NO: 44621 - RNA, 12 nt, Homo sapiens
gcgccgcgcucc

SEQ ID NO: 44622 - RNA, 13 nt, Homo sapiens
gcgccgcgcuccu

SEQ ID NO: 44623 - RNA, 20 nt, Homo sapiens
gcgccgcgcuccucggacgg

SEQ ID NO: 44624 - RNA, 11 nt, Homo sapiens
gcgccuccgcu

SEQ ID NO: 44625 - RNA, 19 nt, Homo sapiens
gcgccuccgcuacuuccag

SEQ ID NO: 44626 - RNA, 20 nt, Homo sapiens
gcgccuccgcuacuuccagg

SEQ ID NO: 44627 - RNA, 22 nt, Homo sapiens
gcgccuccgcuacuuccagggc

SEQ ID NO: 44628 - RNA, 23 nt, Homo sapiens
gcgccuccgcuacuuccagggcu

SEQ ID NO: 44629 - RNA, 15 nt, Homo sapiens
gcgcgcaccuguaau

SEQ ID NO: 44630 - RNA, 16 nt, Homo sapiens
gcgcgcaccuguaauc

SEQ ID NO: 44631 - RNA, 12 nt, Homo sapiens
gcgcgccaccac

SEQ ID NO: 44632 - RNA, 14 nt, Homo sapiens
gcgcgccaccacgc

SEQ ID NO: 44633 - RNA, 16 nt, Homo sapiens
gcgcgccaccacgccc

SEQ ID NO: 44634 - RNA, 14 nt, Homo sapiens
gcgcgcccucuggc

SEQ ID NO: 44635 - RNA, 18 nt, Homo sapiens
gcgcgcccucuggcugcu

SEQ ID NO: 44636 - RNA, 21 nt, Homo sapiens
gcgcgcccucuggcugcuggu

SEQ ID NO: 44637 - RNA, 11 nt, Homo sapiens
gcgcgccgcgc

SEQ ID NO: 44638 - RNA, 13 nt, Homo sapiens
gcgcgccgcgcuc

SEQ ID NO: 44639 - RNA, 14 nt, Homo sapiens
gcgcgccgcgcucc

SEQ ID NO: 44640 - RNA, 13 nt, Homo sapiens
gcgcgccuccgcu

SEQ ID NO: 44641 - RNA, 14 nt, Homo sapiens
gcgcgccuccgcua

SEQ ID NO: 44642 - RNA, 20 nt, Homo sapiens
gcgcgccuccgcuacuucca

SEQ ID NO: 44643 - RNA, 11 nt, Homo sapiens
gcgcgcgccac

SEQ ID NO: 44644 - RNA, 12 nt, Homo sapiens
gcgcgcgccacc

SEQ ID NO: 44645 - RNA, 13 nt, Homo sapiens
gcgcgcgccacca

SEQ ID NO: 44646 - RNA, 14 nt, Homo sapiens
gcgcgcgccaccac

SEQ ID NO: 44647 - RNA, 15 nt, Homo sapiens
gcgcgcgccaccacg

SEQ ID NO: 44648 - RNA, 13 nt, Homo sapiens
gcgcgcgcccucu

SEQ ID NO: 44649 - RNA, 12 nt, Homo sapiens
gcgcgcgcgccc

SEQ ID NO: 44650 - RNA, 15 nt, Homo sapiens
gcgcgcucaucccac

SEQ ID NO: 44651 - RNA, 20 nt, Homo sapiens
gcgcgcucaucccacccgcc

SEQ ID NO: 44652 - RNA, 23 nt, Homo sapiens
gcgcgcucaucccacccgcccac

SEQ ID NO: 44653 - RNA, 11 nt, Homo sapiens
gcgcgcuccgc

SEQ ID NO: 44654 - RNA, 13 nt, Homo sapiens
gcgcgcuccgcgc

SEQ ID NO: 44655 - RNA, 14 nt, Homo sapiens
gcgcgcuccgcgca

SEQ ID NO: 44656 - RNA, 15 nt, Homo sapiens
gcgcgcuccgcgcag

SEQ ID NO: 44657 - RNA, 22 nt, Homo sapiens
gcgcgcuccgcgcagcucaggc

SEQ ID NO: 44658 - RNA, 23 nt, Homo sapiens
gcgcggcgggagggcgcggggcg

SEQ ID NO: 44659 - RNA, 12 nt, Homo sapiens
gcgcggggcggg

SEQ ID NO: 44660 - RNA, 15 nt, Homo sapiens
gcgcggggcggggag

SEQ ID NO: 44661 - RNA, 16 nt, Homo sapiens
gcgcggggcggggagc

SEQ ID NO: 44662 - RNA, 20 nt, Homo sapiens
gcgcggggcggggagcgagc

SEQ ID NO: 44663 - RNA, 21 nt, Homo sapiens
gcgcggggcggggagcgagcc

SEQ ID NO: 44664 - RNA, 12 nt, Homo sapiens
gcgcgugcaggc

SEQ ID NO: 44665 - RNA, 16 nt, Homo sapiens
gcgcgugcaggcagca

SEQ ID NO: 44666 - RNA, 16 nt, Homo sapiens
gcgcucaucccacccg

SEQ ID NO: 44667 - RNA, 20 nt, Homo sapiens
gcgcucaucccacccgccca

SEQ ID NO: 44668 - RNA, 12 nt, Homo sapiens
gcgcuccgcgca

SEQ ID NO: 44669 - RNA, 13 nt, Homo sapiens
gcgcuccgcgcag

SEQ ID NO: 44670 - RNA, 14 nt, Homo sapiens
gcgcuccgcgcagc

SEQ ID NO: 44671 - RNA, 15 nt, Homo sapiens
gcgcuccgcgcagcu

SEQ ID NO: 44672 - RNA, 20 nt, Homo sapiens
gcgcuccucggacggcuccg

SEQ ID NO: 44673 - RNA, 12 nt, Homo sapiens
gcgcucgcuucc

SEQ ID NO: 44674 - RNA, 13 nt, Homo sapiens
gcgcucgcuuccg

SEQ ID NO: 44675 - RNA, 14 nt, Homo sapiens
gcgcucgcuuccgc

SEQ ID NO: 44676 - RNA, 17 nt, Homo sapiens
gcgcucgcuuccgcauc

SEQ ID NO: 44677 - RNA, 18 nt, Homo sapiens
gcgcucgcuuccgcaucc

SEQ ID NO: 44678 - RNA, 19 nt, Homo sapiens
gcgcucgcuuccgcauccu

SEQ ID NO: 44679 - RNA, 13 nt, Homo sapiens
gcgcucggccugc

SEQ ID NO: 44680 - RNA, 14 nt, Homo sapiens
gcgcucggccugcu

SEQ ID NO: 44681 - RNA, 15 nt, Homo sapiens
gcgcucggccugcuc

SEQ ID NO: 44682 - RNA, 17 nt, Homo sapiens
gcgcucggccugcucgc

SEQ ID NO: 44683 - RNA, 18 nt, Homo sapiens
gcgcucggccugcucgcc

SEQ ID NO: 44684 - RNA, 19 nt, Homo sapiens
gcgcucggccugcucgccc

SEQ ID NO: 44685 - RNA, 21 nt, Homo sapiens
gcgcucggccugcucgcccac

SEQ ID NO: 44686 - RNA, 14 nt, Homo sapiens
gcgcugcgcgccgc

SEQ ID NO: 44687 - RNA, 16 nt, Homo sapiens
gcgcugcgcgccgcgc

SEQ ID NO: 44688 - RNA, 17 nt, Homo sapiens
gcgcugcgcgccgcgcu

SEQ ID NO: 44689 - RNA, 19 nt, Homo sapiens
gcgcugcgcgccgcgcucc

SEQ ID NO: 44690 - RNA, 22 nt, Homo sapiens
gcgcugcgcgccgcgcuccucg

SEQ ID NO: 44691 - RNA, 13 nt, Homo sapiens
gcgcuggcugcgc

SEQ ID NO: 44692 - RNA, 14 nt, Homo sapiens
gcgcuggcugcgcu

SEQ ID NO: 44693 - RNA, 23 nt, Homo sapiens
gcgcuggcugcgcucggccugcu

SEQ ID NO: 44694 - RNA, 12 nt, Homo sapiens
gcggaccuuccc

SEQ ID NO: 44695 - RNA, 13 nt, Homo sapiens
gcggaccuuccca

SEQ ID NO: 44696 - RNA, 14 nt, Homo sapiens
gcggaccuucccag

SEQ ID NO: 44697 - RNA, 15 nt, Homo sapiens
gcggaccuucccagc

SEQ ID NO: 44698 - RNA, 18 nt, Homo sapiens
gcggaccuucccagcuag

SEQ ID NO: 44699 - RNA, 17 nt, Homo sapiens
gcggauccaagcaaaug

SEQ ID NO: 44700 - RNA, 16 nt, Homo sapiens
gcggcccugugcggcc

SEQ ID NO: 44701 - RNA, 21 nt, Homo sapiens
gcggcccugugcggccugguc

SEQ ID NO: 44702 - RNA, 22 nt, Homo sapiens
gcggcccugugcggccuggucu

SEQ ID NO: 44703 - RNA, 13 nt, Homo sapiens
gcggccuggucua

SEQ ID NO: 44704 - RNA, 21 nt, Homo sapiens
gcggccuggucuaccuguucg

SEQ ID NO: 44705 - RNA, 17 nt, Homo sapiens
gcggcggcccugugcgg

SEQ ID NO: 44706 - RNA, 23 nt, Homo sapiens
gcggcggcccugugcggccuggu

SEQ ID NO: 44707 - RNA, 17 nt, Homo sapiens
gcggcgggagggcgcgg

SEQ ID NO: 44708 - RNA, 22 nt, Homo sapiens
gcgggacacaggcuccaaacug

SEQ ID NO: 44709 - RNA, 14 nt, Homo sapiens
gcggggagcgagcc

SEQ ID NO: 44710 - RNA, 21 nt, Homo sapiens
gcggggagcgagccccaggcg

SEQ ID NO: 44711 - RNA, 22 nt, Homo sapiens
gcggggagcgagccccaggcgg

SEQ ID NO: 44712 - RNA, 23 nt, Homo sapiens
gcggggagcgagccccaggcggg

SEQ ID NO: 44713 - RNA, 18 nt, Homo sapiens
gcgugaccugacagccca

SEQ ID NO: 44714 - RNA, 13 nt, Homo sapiens
gcgugagccacca

SEQ ID NO: 44715 - RNA, 15 nt, Homo sapiens
gcgugagccaccaaa

SEQ ID NO: 44716 - RNA, 19 nt, Homo sapiens
gcguuguggggaugaacuu

SEQ ID NO: 44717 - RNA, 17 nt, Homo sapiens
gcuaaauauauauuuua

SEQ ID NO: 44718 - RNA, 14 nt, Homo sapiens
gcuaagcauuccaa

SEQ ID NO: 44719 - RNA, 20 nt, Homo sapiens
gcuaagugaaauaagccaga

SEQ ID NO: 44720 - RNA, 12 nt, Homo sapiens
gcuacaggcccc

SEQ ID NO: 44721 - RNA, 14 nt, Homo sapiens
gcuacaggccccau

SEQ ID NO: 44722 - RNA, 18 nt, Homo sapiens
gcuacaggccccaucugg

SEQ ID NO: 44723 - RNA, 11 nt, Homo sapiens
gcuacgcgcgc

SEQ ID NO: 44724 - RNA, 12 nt, Homo sapiens
gcuacgcgcgcu

SEQ ID NO: 44725 - RNA, 16 nt, Homo sapiens
gcuacgcgcgcuccgc

SEQ ID NO: 44726 - RNA, 21 nt, Homo sapiens
gcuacgcgcgcuccgcgcagc

SEQ ID NO: 44727 - RNA, 14 nt, Homo sapiens
gcuacuuauuguag

SEQ ID NO: 44728 - RNA, 15 nt, Homo sapiens
gcuagaauuugauau

SEQ ID NO: 44729 - RNA, 12 nt, Homo sapiens
gcuaguuuauau

SEQ ID NO: 44730 - RNA, 13 nt, Homo sapiens
gcuauaggugcua

SEQ ID NO: 44731 - RNA, 13 nt, Homo sapiens
gcuaucaauccaa

SEQ ID NO: 44732 - RNA, 14 nt, Homo sapiens
gcuaucaauccaag

SEQ ID NO: 44733 - RNA, 21 nt, Homo sapiens
gcuaucgccaucacagcugaa

SEQ ID NO: 44734 - RNA, 14 nt, Homo sapiens
gcuaugcauuugaa

SEQ ID NO: 44735 - RNA, 13 nt, Homo sapiens
gcuaugcuauuga

SEQ ID NO: 44736 - RNA, 14 nt, Homo sapiens
gcuaugcuauugaa

SEQ ID NO: 44737 - RNA, 19 nt, Homo sapiens
gcuauuuauuaaguauuuu

SEQ ID NO: 44738 - RNA, 23 nt, Homo sapiens
gcucaacaagagacuggaaggac

SEQ ID NO: 44739 - RNA, 14 nt, Homo sapiens
gcucaacauaacau

SEQ ID NO: 44740 - RNA, 15 nt, Homo sapiens
gcucacgccuguaau

SEQ ID NO: 44741 - RNA, 16 nt, Homo sapiens
gcucacgccuguaauc

SEQ ID NO: 44742 - RNA, 14 nt, Homo sapiens
gcucaggcuggcac

SEQ ID NO: 44743 - RNA, 19 nt, Homo sapiens
gcucaggcuggcaccgcug

SEQ ID NO: 44744 - RNA, 20 nt, Homo sapiens
gcucaucccacccgcccacc

SEQ ID NO: 44745 - RNA, 21 nt, Homo sapiens
gcucaucccacccgcccaccg

SEQ ID NO: 44746 - RNA, 23 nt, Homo sapiens
gcucaucccacccgcccaccgca

SEQ ID NO: 44747 - RNA, 20 nt, Homo sapiens
gcucauggaauuggagcucg

SEQ ID NO: 44748 - RNA, 22 nt, Homo sapiens
gcucauggaauuggagcucgug

SEQ ID NO: 44749 - RNA, 15 nt, Homo sapiens
gcuccaaacuggagc

SEQ ID NO: 44750 - RNA, 14 nt, Homo sapiens
gcuccaagaauuuc

SEQ ID NO: 44751 - RNA, 13 nt, Homo sapiens
gcucccuggaaga

SEQ ID NO: 44752 - RNA, 18 nt, Homo sapiens
gcucccuggaagagauca

SEQ ID NO: 44753 - RNA, 15 nt, Homo sapiens
gcuccggacgcugcu

SEQ ID NO: 44754 - RNA, 21 nt, Homo sapiens
gcuccggacgcugcugccgug

SEQ ID NO: 44755 - RNA, 13 nt, Homo sapiens
gcuccucggacgg

SEQ ID NO: 44756 - RNA, 19 nt, Homo sapiens
gcuccucggacggcuccgg

SEQ ID NO: 44757 - RNA, 21 nt, Homo sapiens
gcuccucggacggcuccggac

SEQ ID NO: 44758 - RNA, 19 nt, Homo sapiens
gcuccugagacacaugggu

SEQ ID NO: 44759 - RNA, 14 nt, Homo sapiens
gcucgcccacuucc

SEQ ID NO: 44760 - RNA, 15 nt, Homo sapiens
gcucgcccacuuccu

SEQ ID NO: 44761 - RNA, 17 nt, Homo sapiens
gcucgcccacuuccucc

SEQ ID NO: 44762 - RNA, 21 nt, Homo sapiens
gcucgcccacuuccucccggc

SEQ ID NO: 44763 - RNA, 22 nt, Homo sapiens
gcucgcccacuuccucccggcc

SEQ ID NO: 44764 - RNA, 23 nt, Homo sapiens
gcucgcccacuuccucccggccg

SEQ ID NO: 44765 - RNA, 13 nt, Homo sapiens
gcucgcuuccgca

SEQ ID NO: 44766 - RNA, 15 nt, Homo sapiens
gcucgcuuccgcauc

SEQ ID NO: 44767 - RNA, 18 nt, Homo sapiens
gcucgcuuccgcauccua

SEQ ID NO: 44768 - RNA, 19 nt, Homo sapiens
gcucgcuuccgcauccuag

SEQ ID NO: 44769 - RNA, 20 nt, Homo sapiens
gcucgcuuccgcauccuagu

SEQ ID NO: 44770 - RNA, 21 nt, Homo sapiens
gcucgcuuccgcauccuaguc

SEQ ID NO: 44771 - RNA, 22 nt, Homo sapiens
gcucgcuuccgcauccuagucu

SEQ ID NO: 44772 - RNA, 15 nt, Homo sapiens
gcucggccugcucgc

SEQ ID NO: 44773 - RNA, 17 nt, Homo sapiens
gcucggccugcucgccc

SEQ ID NO: 44774 - RNA, 21 nt, Homo sapiens
gcucuaaaugucaaucagccu

SEQ ID NO: 44775 - RNA, 20 nt, Homo sapiens
gcucucaguugcagcccugc

SEQ ID NO: 44776 - RNA, 21 nt, Homo sapiens
gcucucaguugcagcccugcu

SEQ ID NO: 44777 - RNA, 14 nt, Homo sapiens
gcucucugaccucc

SEQ ID NO: 44778 - RNA, 16 nt, Homo sapiens
gcucugcauacucauu

SEQ ID NO: 44779 - RNA, 13 nt, Homo sapiens
gcucuggaaacca

SEQ ID NO: 44780 - RNA, 17 nt, Homo sapiens
gcucugggauagcugac

SEQ ID NO: 44781 - RNA, 15 nt, Homo sapiens
gcucugggucgccgg

SEQ ID NO: 44782 - RNA, 17 nt, Homo sapiens
gcucugggucgccggca

SEQ ID NO: 44783 - RNA, 19 nt, Homo sapiens
gcucugggucgccggcauc

SEQ ID NO: 44784 - RNA, 13 nt, Homo sapiens
gcugagcagaugu

SEQ ID NO: 44785 - RNA, 13 nt, Homo sapiens
gcugagcagucag

SEQ ID NO: 44786 - RNA, 16 nt, Homo sapiens
gcugaggcaagagaau

SEQ ID NO: 44787 - RNA, 13 nt, Homo sapiens
gcugaggcgggug

SEQ ID NO: 44788 - RNA, 19 nt, Homo sapiens
gcugauugucugaaauuuu

SEQ ID NO: 44789 - RNA, 13 nt, Homo sapiens
gcugcaccugugc

SEQ ID NO: 44790 - RNA, 15 nt, Homo sapiens
gcugcaccugugccg

SEQ ID NO: 44791 - RNA, 16 nt, Homo sapiens
gcugcaccugugccgu

SEQ ID NO: 44792 - RNA, 22 nt, Homo sapiens
gcugcagccccugggaccaggc

SEQ ID NO: 44793 - RNA, 13 nt, Homo sapiens
gcugcauuuaaaa

SEQ ID NO: 44794 - RNA, 15 nt, Homo sapiens
gcugccaauauccua

SEQ ID NO: 44795 - RNA, 15 nt, Homo sapiens
gcugccccggggagg

SEQ ID NO: 44796 - RNA, 20 nt, Homo sapiens
gcugccccggggaggggcgc

SEQ ID NO: 44797 - RNA, 23 nt, Homo sapiens
gcugccccggggaggggcgcucg

SEQ ID NO: 44798 - RNA, 24 nt, Homo sapiens
gcugccccggggaggggcgcucgc

SEQ ID NO: 44799 - RNA, 14 nt, Homo sapiens
gcugccgugggccu

SEQ ID NO: 44800 - RNA, 17 nt, Homo sapiens
gcugccuccccagcucu

SEQ ID NO: 44801 - RNA, 24 nt, Homo sapiens
gcugccuccccagcucuaucccaa

SEQ ID NO: 44802 - RNA, 13 nt, Homo sapiens
gcugcgcgccgcg

SEQ ID NO: 44803 - RNA, 17 nt, Homo sapiens
gcugcgcgccgcgcucc

SEQ ID NO: 44804 - RNA, 18 nt, Homo sapiens
gcugcgcgccgcgcuccu

SEQ ID NO: 44805 - RNA, 19 nt, Homo sapiens
gcugcgcgccgcgcuccuc

SEQ ID NO: 44806 - RNA, 13 nt, Homo sapiens
gcugcgcucggcc

SEQ ID NO: 44807 - RNA, 16 nt, Homo sapiens
gcugcgcucggccugc

SEQ ID NO: 44808 - RNA, 23 nt, Homo sapiens
gcugcgcucggccugcucgccca

SEQ ID NO: 44809 - RNA, 14 nt, Homo sapiens
gcugcugccguggg

SEQ ID NO: 44810 - RNA, 16 nt, Homo sapiens
gcugcugguggcgcug

SEQ ID NO: 44811 - RNA, 19 nt, Homo sapiens
gcugcugguggcgcuggcu

SEQ ID NO: 44812 - RNA, 22 nt, Homo sapiens
gcugcugguggcgcuggcugcg

SEQ ID NO: 44813 - RNA, 13 nt, Homo sapiens
gcuggagcucugc

SEQ ID NO: 44814 - RNA, 14 nt, Homo sapiens
gcuggagcucugcc

SEQ ID NO: 44815 - RNA, 12 nt, Homo sapiens
gcuggagugcag

SEQ ID NO: 44816 - RNA, 13 nt, Homo sapiens
gcuggagugcagu

SEQ ID NO: 44817 - RNA, 14 nt, Homo sapiens
gcuggagugcagug

SEQ ID NO: 44818 - RNA, 17 nt, Homo sapiens
gcuggagugcaguggcg

SEQ ID NO: 44819 - RNA, 23 nt, Homo sapiens
gcuggauguggagggggcgcgug

SEQ ID NO: 44820 - RNA, 19 nt, Homo sapiens
gcuggauucaagugauccg

SEQ ID NO: 44821 - RNA, 22 nt, Homo sapiens
gcuggauucaagugauccgccc

SEQ ID NO: 44822 - RNA, 19 nt, Homo sapiens
gcuggcaccgcuguacgcg

SEQ ID NO: 44823 - RNA, 17 nt, Homo sapiens
gcuggccaacgggguga

SEQ ID NO: 44824 - RNA, 17 nt, Homo sapiens
gcuggccaggcuggucu

SEQ ID NO: 44825 - RNA, 12 nt, Homo sapiens
gcuggcugcgcu

SEQ ID NO: 44826 - RNA, 15 nt, Homo sapiens
gcuggcugcgcucgg

SEQ ID NO: 44827 - RNA, 16 nt, Homo sapiens
gcuggcugcgcucggc

SEQ ID NO: 44828 - RNA, 17 nt, Homo sapiens
gcuggcugcgcucggcc

SEQ ID NO: 44829 - RNA, 18 nt, Homo sapiens
gcuggcugcgcucggccu

SEQ ID NO: 44830 - RNA, 19 nt, Homo sapiens
gcuggcugcgcucggccug

SEQ ID NO: 44831 - RNA, 20 nt, Homo sapiens
gcuggcugcgcucggccugc

SEQ ID NO: 44832 - RNA, 18 nt, Homo sapiens
gcuggcuugccucuugca

SEQ ID NO: 44833 - RNA, 22 nt, Homo sapiens
gcugggaauuacaggcgugagc

SEQ ID NO: 44834 - RNA, 15 nt, Homo sapiens
gcugggaguggcaug

SEQ ID NO: 44835 - RNA, 16 nt, Homo sapiens
gcugggaguggcaugu

SEQ ID NO: 44836 - RNA, 18 nt, Homo sapiens
gcuggucucgaacugcug

SEQ ID NO: 44837 - RNA, 20 nt, Homo sapiens
gcuggucucgaacugcugga

SEQ ID NO: 44838 - RNA, 12 nt, Homo sapiens
gcugguggcgcu

SEQ ID NO: 44839 - RNA, 13 nt, Homo sapiens
gcugguggcgcug

SEQ ID NO: 44840 - RNA, 14 nt, Homo sapiens
gcugguggcgcugg

SEQ ID NO: 44841 - RNA, 18 nt, Homo sapiens
gcugguggcgcuggcugc

SEQ ID NO: 44842 - RNA, 22 nt, Homo sapiens
gcugguggcgcuggcugcgcuc

SEQ ID NO: 44843 - RNA, 15 nt, Homo sapiens
gcuguacgcgagcgc

SEQ ID NO: 44844 - RNA, 16 nt, Homo sapiens
gcuguacgcgagcgcg

SEQ ID NO: 44845 - RNA, 17 nt, Homo sapiens
gcuguacgcgagcgcgc

SEQ ID NO: 44846 - RNA, 19 nt, Homo sapiens
gcuguacgcgagcgcgcgc

SEQ ID NO: 44847 - RNA, 21 nt, Homo sapiens
gcuguacgcgagcgcgcgcgc

SEQ ID NO: 44848 - RNA, 19 nt, Homo sapiens
gcuguaugauucccagcca

SEQ ID NO: 44849 - RNA, 13 nt, Homo sapiens
gcuguauucuucu

SEQ ID NO: 44850 - RNA, 20 nt, Homo sapiens
gcugucuauguggcuguauc

SEQ ID NO: 44851 - RNA, 23 nt, Homo sapiens
gcuguucacagccagacuggcac

SEQ ID NO: 44852 - RNA, 13 nt, Homo sapiens
gcuguuccucgcc

SEQ ID NO: 44853 - RNA, 16 nt, Homo sapiens
gcuguuccucgccacg

SEQ ID NO: 44854 - RNA, 17 nt, Homo sapiens
gcuguuccucgccacgc

SEQ ID NO: 44855 - RNA, 18 nt, Homo sapiens
gcuguuccucgccacgcu

SEQ ID NO: 44856 - RNA, 14 nt, Homo sapiens
gcuguuuucccuga

SEQ ID NO: 44857 - RNA, 15 nt, Homo sapiens
gcuuaaaauguaauu

SEQ ID NO: 44858 - RNA, 21 nt, Homo sapiens
gcuuaauuauugauguuuuca

SEQ ID NO: 44859 - RNA, 14 nt, Homo sapiens
gcuuagaacaaagg

SEQ ID NO: 44860 - RNA, 12 nt, Homo sapiens
gcuuagacccuc

SEQ ID NO: 44861 - RNA, 13 nt, Homo sapiens
gcuuagacccuca

SEQ ID NO: 44862 - RNA, 20 nt, Homo sapiens
gcuuagacccucaugcugcc

SEQ ID NO: 44863 - RNA, 21 nt, Homo sapiens
gcuuauucacaagacccaaaa

SEQ ID NO: 44864 - RNA, 16 nt, Homo sapiens
gcuuauugguggcugu

SEQ ID NO: 44865 - RNA, 17 nt, Homo sapiens
gcuucaccuguccccga

SEQ ID NO: 44866 - RNA, 18 nt, Homo sapiens
gcuuccauuccaagccug

SEQ ID NO: 44867 - RNA, 11 nt, Homo sapiens
gcuuccgcauc

SEQ ID NO: 44868 - RNA, 14 nt, Homo sapiens
gcuuccgcauccua

SEQ ID NO: 44869 - RNA, 18 nt, Homo sapiens
gcuuccgcauccuagucu

SEQ ID NO: 44870 - RNA, 20 nt, Homo sapiens
gcuucuauuagcccuucucc

SEQ ID NO: 44871 - RNA, 22 nt, Homo sapiens
gcuugaggacuugggcgggaca

SEQ ID NO: 44872 - RNA, 13 nt, Homo sapiens
gcuuggcccagga

SEQ ID NO: 44873 - RNA, 14 nt, Homo sapiens
gcuuggcccaggag

SEQ ID NO: 44874 - RNA, 15 nt, Homo sapiens
gcuuggcccaggagu

SEQ ID NO: 44875 - RNA, 21 nt, Homo sapiens
gcuuggcccaggaguuuggcc

SEQ ID NO: 44876 - RNA, 15 nt, Homo sapiens
gcuugugugcacaua

SEQ ID NO: 44877 - RNA, 19 nt, Homo sapiens
gcuuguuagcaaaauggau

SEQ ID NO: 44878 - RNA, 19 nt, Homo sapiens
gcuuuaaaacuuauccucc

SEQ ID NO: 44879 - RNA, 13 nt, Homo sapiens
gcuuuaauuucau

SEQ ID NO: 44880 - RNA, 16 nt, Homo sapiens
gcuuuaauuucaugaa

SEQ ID NO: 44881 - RNA, 16 nt, Homo sapiens
gcuuuagggaccugcu

SEQ ID NO: 44882 - RNA, 19 nt, Homo sapiens
gcuuuugcuaggucacaga

SEQ ID NO: 44883 - RNA, 14 nt, Homo sapiens
gcuuuugugcauua

SEQ ID NO: 44884 - RNA, 15 nt, Homo sapiens
ggaaaaugugcaaua

SEQ ID NO: 44885 - RNA, 22 nt, Homo sapiens
ggaaaaugugcaauaugugaug

SEQ ID NO: 44886 - RNA, 12 nt, Homo sapiens
ggaaacaaguca

SEQ ID NO: 44887 - RNA, 18 nt, Homo sapiens
ggaaacaagucagucauu

SEQ ID NO: 44888 - RNA, 15 nt, Homo sapiens
ggaaacguauucaaa

SEQ ID NO: 44889 - RNA, 18 nt, Homo sapiens
ggaaagaagagccggagc

SEQ ID NO: 44890 - RNA, 20 nt, Homo sapiens
ggaaagaagagccggagccu

SEQ ID NO: 44891 - RNA, 13 nt, Homo sapiens
ggaaaggcagcuc

SEQ ID NO: 44892 - RNA, 16 nt, Homo sapiens
ggaaagggucucccuc

SEQ ID NO: 44893 - RNA, 11 nt, Homo sapiens
ggaaauauuuu

SEQ ID NO: 44894 - RNA, 19 nt, Homo sapiens
ggaaauauuuuaauguuuc

SEQ ID NO: 44895 - RNA, 15 nt, Homo sapiens
ggaaaugauguuuca

SEQ ID NO: 44896 - RNA, 15 nt, Homo sapiens
ggaacauaaaauaca

SEQ ID NO: 44897 - RNA, 13 nt, Homo sapiens
ggaacugcuugac

SEQ ID NO: 44898 - RNA, 17 nt, Homo sapiens
ggaagaaauuccaggaa

SEQ ID NO: 44899 - RNA, 21 nt, Homo sapiens
ggaagccaaaccucugugagc

SEQ ID NO: 44900 - RNA, 16 nt, Homo sapiens
ggaaggcaacauacac

SEQ ID NO: 44901 - RNA, 15 nt, Homo sapiens
ggaagguauuuaaua

SEQ ID NO: 44902 - RNA, 19 nt, Homo sapiens
ggaagguucuggugugaac

SEQ ID NO: 44903 - RNA, 23 nt, Homo sapiens
ggaauauguuagagaauuuccuu

SEQ ID NO: 44904 - RNA, 20 nt, Homo sapiens
ggaauauuugcaagacauag

SEQ ID NO: 44905 - RNA, 18 nt, Homo sapiens
ggaaucacuggcuguuaa

SEQ ID NO: 44906 - RNA, 19 nt, Homo sapiens
ggaaugaagauacugaaau

SEQ ID NO: 44907 - RNA, 17 nt, Homo sapiens
ggaauguaugugcacau

SEQ ID NO: 44908 - RNA, 12 nt, Homo sapiens
ggaauugaccca

SEQ ID NO: 44909 - RNA, 14 nt, Homo sapiens
ggaauuggagcucg

SEQ ID NO: 44910 - RNA, 15 nt, Homo sapiens
ggaauuggagcucgu

SEQ ID NO: 44911 - RNA, 18 nt, Homo sapiens
ggaauuggagcucguggg

SEQ ID NO: 44912 - RNA, 22 nt, Homo sapiens
ggacagcccuucuuuccacaga

SEQ ID NO: 44913 - RNA, 18 nt, Homo sapiens
ggacaggauaagagggau

SEQ ID NO: 44914 - RNA, 16 nt, Homo sapiens
ggacaugggccccaga

SEQ ID NO: 44915 - RNA, 16 nt, Homo sapiens
ggacauuugcucaugg

SEQ ID NO: 44916 - RNA, 18 nt, Homo sapiens
ggacauuugcucauggaa

SEQ ID NO: 44917 - RNA, 19 nt, Homo sapiens
ggacauuugcucauggaau

SEQ ID NO: 44918 - RNA, 18 nt, Homo sapiens
ggaccaggcacccccaga

SEQ ID NO: 44919 - RNA, 13 nt, Homo sapiens
ggaccaucccggc

SEQ ID NO: 44920 - RNA, 16 nt, Homo sapiens
ggaccaucccggccgg

SEQ ID NO: 44921 - RNA, 17 nt, Homo sapiens
ggaccaucccggccggc

SEQ ID NO: 44922 - RNA, 20 nt, Homo sapiens
ggaccaucccggccggcgcg

SEQ ID NO: 44923 - RNA, 21 nt, Homo sapiens
ggaccaucccggccggcgcgc

SEQ ID NO: 44924 - RNA, 23 nt, Homo sapiens
ggaccaucccggccggcgcgcuc

SEQ ID NO: 44925 - RNA, 10 nt, Homo sapiens
ggaccugcug

SEQ ID NO: 44926 - RNA, 18 nt, Homo sapiens
ggaccugggccauaguca

SEQ ID NO: 44927 - RNA, 14 nt, Homo sapiens
ggacgaaccuugaa

SEQ ID NO: 44928 - RNA, 11 nt, Homo sapiens
ggacgcugcug

SEQ ID NO: 44929 - RNA, 15 nt, Homo sapiens
ggacgcugcugccgu

SEQ ID NO: 44930 - RNA, 12 nt, Homo sapiens
ggacggcuccgg

SEQ ID NO: 44931 - RNA, 13 nt, Homo sapiens
ggacggcuccgga

SEQ ID NO: 44932 - RNA, 19 nt, Homo sapiens
ggacggcuccggacgcugc

SEQ ID NO: 44933 - RNA, 21 nt, Homo sapiens
ggacggcuccggacgcugcug

SEQ ID NO: 44934 - RNA, 16 nt, Homo sapiens
ggacuuacuauuuauu

SEQ ID NO: 44935 - RNA, 13 nt, Homo sapiens
ggacuugaaccca

SEQ ID NO: 44936 - RNA, 13 nt, Homo sapiens
ggacuugggcggg

SEQ ID NO: 44937 - RNA, 15 nt, Homo sapiens
ggacuugggcgggac

SEQ ID NO: 44938 - RNA, 18 nt, Homo sapiens
ggacuugggcgggacaca

SEQ ID NO: 44939 - RNA, 19 nt, Homo sapiens
ggacuugggcgggacacag

SEQ ID NO: 44940 - RNA, 19 nt, Homo sapiens
ggagaaaggacccucaaga

SEQ ID NO: 44941 - RNA, 17 nt, Homo sapiens
ggagaagagcuguucac

SEQ ID NO: 44942 - RNA, 18 nt, Homo sapiens
ggagaagagcuguucaca

SEQ ID NO: 44943 - RNA, 11 nt, Homo sapiens
ggagacaccac

SEQ ID NO: 44944 - RNA, 12 nt, Homo sapiens
ggagacaccacc

SEQ ID NO: 44945 - RNA, 13 nt, Homo sapiens
ggagacaccacca

SEQ ID NO: 44946 - RNA, 17 nt, Homo sapiens
ggagauuuacaacuggg

SEQ ID NO: 44947 - RNA, 18 nt, Homo sapiens
ggagccaacagaagcuuc

SEQ ID NO: 44948 - RNA, 12 nt, Homo sapiens
ggagccccaauu

SEQ ID NO: 44949 - RNA, 19 nt, Homo sapiens
ggagccgggaaagaagagc

SEQ ID NO: 44950 - RNA, 12 nt, Homo sapiens
ggagccuccagc

SEQ ID NO: 44951 - RNA, 14 nt, Homo sapiens
ggagccuccagcug

SEQ ID NO: 44952 - RNA, 15 nt, Homo sapiens
ggagccuccagcugc

SEQ ID NO: 44953 - RNA, 17 nt, Homo sapiens
ggagccuccagcugccc

SEQ ID NO: 44954 - RNA, 19 nt, Homo sapiens
ggagccuccagcugccccg

SEQ ID NO: 44955 - RNA, 14 nt, Homo sapiens
ggagccugcaacau

SEQ ID NO: 44956 - RNA, 16 nt, Homo sapiens
ggagcgagccccaggc

SEQ ID NO: 44957 - RNA, 17 nt, Homo sapiens
ggagcgagccccaggcg

SEQ ID NO: 44958 - RNA, 18 nt, Homo sapiens
ggagcgagccccaggcgg

SEQ ID NO: 44959 - RNA, 22 nt, Homo sapiens
ggagcgagccccaggcgggucc

SEQ ID NO: 44960 - RNA, 10 nt, Homo sapiens
ggagcucgug

SEQ ID NO: 44961 - RNA, 11 nt, Homo sapiens
ggagcucgugg

SEQ ID NO: 44962 - RNA, 15 nt, Homo sapiens
ggagcucguggaaca

SEQ ID NO: 44963 - RNA, 17 nt, Homo sapiens
ggagcucgugggacagu

SEQ ID NO: 44964 - RNA, 19 nt, Homo sapiens
ggagcucugcccauccugc

SEQ ID NO: 44965 - RNA, 20 nt, Homo sapiens
ggagcucugcccauccugcc

SEQ ID NO: 44966 - RNA, 11 nt, Homo sapiens
ggagcugccuc

SEQ ID NO: 44967 - RNA, 18 nt, Homo sapiens
ggaggaaaaggugucuug

SEQ ID NO: 44968 - RNA, 16 nt, Homo sapiens
ggaggcugaggcgggu

SEQ ID NO: 44969 - RNA, 22 nt, Homo sapiens
ggagggaagccuuggggcugau

SEQ ID NO: 44970 - RNA, 12 nt, Homo sapiens
ggagggcgcggg

SEQ ID NO: 44971 - RNA, 14 nt, Homo sapiens
ggagggcgcggggc

SEQ ID NO: 44972 - RNA, 15 nt, Homo sapiens
ggagggcgcggggcg

SEQ ID NO: 44973 - RNA, 14 nt, Homo sapiens
ggaggggcgcucgc

SEQ ID NO: 44974 - RNA, 18 nt, Homo sapiens
ggagggggcgcgugcagg

SEQ ID NO: 44975 - RNA, 16 nt, Homo sapiens
ggaguggcauguauga

SEQ ID NO: 44976 - RNA, 16 nt, Homo sapiens
ggaguggcgcgcgcca

SEQ ID NO: 44977 - RNA, 21 nt, Homo sapiens
ggaguuaggcuauucacaacc

SEQ ID NO: 44978 - RNA, 21 nt, Homo sapiens
ggaguuccuaaccagccuggu

SEQ ID NO: 44979 - RNA, 13 nt, Homo sapiens
ggaguuuggccag

SEQ ID NO: 44980 - RNA, 14 nt, Homo sapiens
ggaguuuggccaga

SEQ ID NO: 44981 - RNA, 15 nt, Homo sapiens
ggauagagugggaca

SEQ ID NO: 44982 - RNA, 13 nt, Homo sapiens
ggaugauguuucg

SEQ ID NO: 44983 - RNA, 13 nt, Homo sapiens
ggaugcccacggc

SEQ ID NO: 44984 - RNA, 20 nt, Homo sapiens
ggauucaagugauccgccca

SEQ ID NO: 44985 - RNA, 15 nt, Homo sapiens
ggauucaauuuuaag

SEQ ID NO: 44986 - RNA, 15 nt, Homo sapiens
ggauuccucacuuug

SEQ ID NO: 44987 - RNA, 16 nt, Homo sapiens
ggauuccucacuuuga

SEQ ID NO: 44988 - RNA, 14 nt, Homo sapiens
ggauuugcaacccc

SEQ ID NO: 44989 - RNA, 19 nt, Homo sapiens
ggcaaacugccaucauuua

SEQ ID NO: 44990 - RNA, 14 nt, Homo sapiens
ggcacaggguuuau

SEQ ID NO: 44991 - RNA, 22 nt, Homo sapiens
ggcacccccagaaugaccuggc

SEQ ID NO: 44992 - RNA, 11 nt, Homo sapiens
ggcaccgcugu

SEQ ID NO: 44993 - RNA, 20 nt, Homo sapiens
ggcaccgcuguacgcgagcg

SEQ ID NO: 44994 - RNA, 13 nt, Homo sapiens
ggcacuugggaca

SEQ ID NO: 44995 - RNA, 19 nt, Homo sapiens
ggcacuugggacaaaaaca

SEQ ID NO: 44996 - RNA, 20 nt, Homo sapiens
ggcacuugggacaaaaacaa

SEQ ID NO: 44997 - RNA, 21 nt, Homo sapiens
ggcacuugggacaaaaacaaa

SEQ ID NO: 44998 - RNA, 13 nt, Homo sapiens
ggcagaagcaacc

SEQ ID NO: 44999 - RNA, 14 nt, Homo sapiens
ggcagaagcaaccc

SEQ ID NO: 45000 - RNA, 15 nt, Homo sapiens
ggcagcaggauagag

SEQ ID NO: 45001 - RNA, 22 nt, Homo sapiens
ggcagcaggauagagugggaca

SEQ ID NO: 45002 - RNA, 17 nt, Homo sapiens
ggcagggacaggauaag

SEQ ID NO: 45003 - RNA, 17 nt, Homo sapiens
ggcaggucacacaaccu

SEQ ID NO: 45004 - RNA, 13 nt, Homo sapiens
ggcagugcuuggc

SEQ ID NO: 45005 - RNA, 20 nt, Homo sapiens
ggcagugcuuggcccaggag

SEQ ID NO: 45006 - RNA, 21 nt, Homo sapiens
ggcaguuuuccauugguuuac

SEQ ID NO: 45007 - RNA, 19 nt, Homo sapiens
ggcaugguggcgcgcaccu

SEQ ID NO: 45008 - RNA, 21 nt, Homo sapiens
ggcauguaugacgugacuggc

SEQ ID NO: 45009 - RNA, 22 nt, Homo sapiens
ggcauguaugacgugacuggcc

SEQ ID NO: 45010 - RNA, 14 nt, Homo sapiens
ggcauucucugaag

SEQ ID NO: 45011 - RNA, 16 nt, Homo sapiens
ggcauuuucacuuuug

SEQ ID NO: 45012 - RNA, 14 nt, Homo sapiens
ggccaacuaggcag

SEQ ID NO: 45013 - RNA, 14 nt, Homo sapiens
ggccagaagucaag

SEQ ID NO: 45014 - RNA, 22 nt, Homo sapiens
ggccagaagucaaggcuuagac

SEQ ID NO: 45015 - RNA, 21 nt, Homo sapiens
ggcccaggaguuuggccagaa

SEQ ID NO: 45016 - RNA, 21 nt, Homo sapiens
ggccccagauaccaugaugcu

SEQ ID NO: 45017 - RNA, 16 nt, Homo sapiens
ggcccccgggccgacg

SEQ ID NO: 45018 - RNA, 13 nt, Homo sapiens
ggcccugccaugc

SEQ ID NO: 45019 - RNA, 14 nt, Homo sapiens
ggcccugccaugcu

SEQ ID NO: 45020 - RNA, 20 nt, Homo sapiens
ggcccugccaugcucuccaa

SEQ ID NO: 45021 - RNA, 23 nt, Homo sapiens
ggcccuggccuagcauacguaca

SEQ ID NO: 45022 - RNA, 11 nt, Homo sapiens
ggcccugugcg

SEQ ID NO: 45023 - RNA, 12 nt, Homo sapiens
ggcccugugcgg

SEQ ID NO: 45024 - RNA, 16 nt, Homo sapiens
ggcccugugcggccug

SEQ ID NO: 45025 - RNA, 17 nt, Homo sapiens
ggcccugugcggccugg

SEQ ID NO: 45026 - RNA, 18 nt, Homo sapiens
ggcccugugcggccuggu

SEQ ID NO: 45027 - RNA, 19 nt, Homo sapiens
ggcccugugcggccugguc

SEQ ID NO: 45028 - RNA, 12 nt, Homo sapiens
ggccgacggagc

SEQ ID NO: 45029 - RNA, 14 nt, Homo sapiens
ggccgacggagccg

SEQ ID NO: 45030 - RNA, 17 nt, Homo sapiens
ggccgacggagccggga

SEQ ID NO: 45031 - RNA, 14 nt, Homo sapiens
ggccgcgcugcgcg

SEQ ID NO: 45032 - RNA, 15 nt, Homo sapiens
ggccgcgcugcgcgc

SEQ ID NO: 45033 - RNA, 17 nt, Homo sapiens
ggccgcgcugcgcgccg

SEQ ID NO: 45034 - RNA, 20 nt, Homo sapiens
ggccgcgcugcgcgccgcgc

SEQ ID NO: 45035 - RNA, 21 nt, Homo sapiens
ggccgcgcugcgcgccgcgcu

SEQ ID NO: 45036 - RNA, 11 nt, Homo sapiens
ggccggcgcgc

SEQ ID NO: 45037 - RNA, 12 nt, Homo sapiens
ggccggcgcgcu

SEQ ID NO: 45038 - RNA, 16 nt, Homo sapiens
ggccggcgcgcucauc

SEQ ID NO: 45039 - RNA, 13 nt, Homo sapiens
ggccuccucucuc

SEQ ID NO: 45040 - RNA, 23 nt, Homo sapiens
ggccugagaccaaggcccccggg

SEQ ID NO: 45041 - RNA, 14 nt, Homo sapiens
ggccugcucgccca

SEQ ID NO: 45042 - RNA, 15 nt, Homo sapiens
ggccugcucgcccac

SEQ ID NO: 45043 - RNA, 20 nt, Homo sapiens
ggccugcucgcccacuuccu

SEQ ID NO: 45044 - RNA, 21 nt, Homo sapiens
ggccugcucgcccacuuccuc

SEQ ID NO: 45045 - RNA, 10 nt, Homo sapiens
ggccugcugg

SEQ ID NO: 45046 - RNA, 11 nt, Homo sapiens
ggccugcugga

SEQ ID NO: 45047 - RNA, 14 nt, Homo sapiens
ggccugcuggaugu

SEQ ID NO: 45048 - RNA, 15 nt, Homo sapiens
ggccugcuggaugug

SEQ ID NO: 45049 - RNA, 12 nt, Homo sapiens
ggccuggcuggg

SEQ ID NO: 45050 - RNA, 19 nt, Homo sapiens
ggccuggucuaccuguucg

SEQ ID NO: 45051 - RNA, 21 nt, Homo sapiens
ggccuggucuaccuguucgcg

SEQ ID NO: 45052 - RNA, 21 nt, Homo sapiens
ggccuguugaagaugcuugua

SEQ ID NO: 45053 - RNA, 20 nt, Homo sapiens
ggcgacaguuuuccuucuca

SEQ ID NO: 45054 - RNA, 12 nt, Homo sapiens
ggcgcgcaccug

SEQ ID NO: 45055 - RNA, 21 nt, Homo sapiens
ggcgcgcaccuguaaucccag

SEQ ID NO: 45056 - RNA, 15 nt, Homo sapiens
ggcgcgcgccaccac

SEQ ID NO: 45057 - RNA, 17 nt, Homo sapiens
ggcgcgcgccaccacgc

SEQ ID NO: 45058 - RNA, 18 nt, Homo sapiens
ggcgcgcgccaccacgcc

SEQ ID NO: 45059 - RNA, 19 nt, Homo sapiens
ggcgcgcgccaccacgccc

SEQ ID NO: 45060 - RNA, 20 nt, Homo sapiens
ggcgcgcgccaccacgccca

SEQ ID NO: 45061 - RNA, 21 nt, Homo sapiens
ggcgcgcgccaccacgcccag

SEQ ID NO: 45062 - RNA, 22 nt, Homo sapiens
ggcgcgcucaucccacccgccc

SEQ ID NO: 45063 - RNA, 21 nt, Homo sapiens
ggcgcggcgggagggcgcggg

SEQ ID NO: 45064 - RNA, 15 nt, Homo sapiens
ggcgcggggcgggga

SEQ ID NO: 45065 - RNA, 22 nt, Homo sapiens
ggcgcggggcggggagcgagcc

SEQ ID NO: 45066 - RNA, 23 nt, Homo sapiens
ggcgcggggcggggagcgagccc

SEQ ID NO: 45067 - RNA, 17 nt, Homo sapiens
ggcgcgugcaggcagca

SEQ ID NO: 45068 - RNA, 20 nt, Homo sapiens
ggcgcgugcaggcagcagga

SEQ ID NO: 45069 - RNA, 14 nt, Homo sapiens
ggcgcucgcuuccg

SEQ ID NO: 45070 - RNA, 16 nt, Homo sapiens
ggcgcucgcuuccgca

SEQ ID NO: 45071 - RNA, 14 nt, Homo sapiens
ggcgcuggcugcgc

SEQ ID NO: 45072 - RNA, 20 nt, Homo sapiens
ggcgcuggcugcgcucggcc

SEQ ID NO: 45073 - RNA, 22 nt, Homo sapiens
ggcgcuggcugcgcucggccug

SEQ ID NO: 45074 - RNA, 23 nt, Homo sapiens
ggcgcuggcugcgcucggccugc

SEQ ID NO: 45075 - RNA, 13 nt, Homo sapiens
ggcggcccugugc

SEQ ID NO: 45076 - RNA, 16 nt, Homo sapiens
ggcggcccugugcggc

SEQ ID NO: 45077 - RNA, 19 nt, Homo sapiens
ggcggcccugugcggccug

SEQ ID NO: 45078 - RNA, 20 nt, Homo sapiens
ggcggcccugugcggccugg

SEQ ID NO: 45079 - RNA, 13 nt, Homo sapiens
ggcggcggcccug

SEQ ID NO: 45080 - RNA, 23 nt, Homo sapiens
ggcgggacacaggcuccaaacug

SEQ ID NO: 45081 - RNA, 13 nt, Homo sapiens
ggcggggagcgag

SEQ ID NO: 45082 - RNA, 11 nt, Homo sapiens
ggcggguccgg

SEQ ID NO: 45083 - RNA, 14 nt, Homo sapiens
ggcggguccggguc

SEQ ID NO: 45084 - RNA, 18 nt, Homo sapiens
ggcggguggaucacuuga

SEQ ID NO: 45085 - RNA, 19 nt, Homo sapiens
ggcgugaccugacagccca

SEQ ID NO: 45086 - RNA, 21 nt, Homo sapiens
ggcgugaccugacagcccaag

SEQ ID NO: 45087 - RNA, 19 nt, Homo sapiens
ggcuaagcaaaaugugaua

SEQ ID NO: 45088 - RNA, 15 nt, Homo sapiens
ggcuacgcgcgcucc

SEQ ID NO: 45089 - RNA, 17 nt, Homo sapiens
ggcuacgcgcgcuccgc

SEQ ID NO: 45090 - RNA, 20 nt, Homo sapiens
ggcuacgcgcgcuccgcgca

SEQ ID NO: 45091 - RNA, 21 nt, Homo sapiens
ggcuacgcgcgcuccgcgcag

SEQ ID NO: 45092 - RNA, 13 nt, Homo sapiens
ggcuauucacaac

SEQ ID NO: 45093 - RNA, 14 nt, Homo sapiens
ggcuauucacaacc

SEQ ID NO: 45094 - RNA, 22 nt, Homo sapiens
ggcuauucacaaccacucauuc

SEQ ID NO: 45095 - RNA, 16 nt, Homo sapiens
ggcuauuuaaagacaa

SEQ ID NO: 45096 - RNA, 20 nt, Homo sapiens
ggcucacgccuguaauccca

SEQ ID NO: 45097 - RNA, 13 nt, Homo sapiens
ggcuccaaacugg

SEQ ID NO: 45098 - RNA, 17 nt, Homo sapiens
ggcuccaaacuggagcu

SEQ ID NO: 45099 - RNA, 16 nt, Homo sapiens
ggcuccggacgcugcu

SEQ ID NO: 45100 - RNA, 18 nt, Homo sapiens
ggcuccggacgcugcugc

SEQ ID NO: 45101 - RNA, 20 nt, Homo sapiens
ggcuccggacgcugcugccg

SEQ ID NO: 45102 - RNA, 16 nt, Homo sapiens
ggcuccugagacacau

SEQ ID NO: 45103 - RNA, 13 nt, Homo sapiens
ggcugagcaguca

SEQ ID NO: 45104 - RNA, 15 nt, Homo sapiens
ggcugaggcgggugg

SEQ ID NO: 45105 - RNA, 12 nt, Homo sapiens
ggcugcgcucgg

SEQ ID NO: 45106 - RNA, 16 nt, Homo sapiens
ggcugcgcucggccug

SEQ ID NO: 45107 - RNA, 19 nt, Homo sapiens
ggcugcgcucggccugcuc

SEQ ID NO: 45108 - RNA, 22 nt, Homo sapiens
ggcugcgcucggccugcucgcc

SEQ ID NO: 45109 - RNA, 13 nt, Homo sapiens
ggcugcugguggc

SEQ ID NO: 45110 - RNA, 14 nt, Homo sapiens
ggcugcugguggcg

SEQ ID NO: 45111 - RNA, 16 nt, Homo sapiens
ggcugcugguggcgcu

SEQ ID NO: 45112 - RNA, 17 nt, Homo sapiens
ggcugcugguggcgcug

SEQ ID NO: 45113 - RNA, 16 nt, Homo sapiens
ggcuggagcugccucu

SEQ ID NO: 45114 - RNA, 21 nt, Homo sapiens
ggcuggagcugccucucucau

SEQ ID NO: 45115 - RNA, 12 nt, Homo sapiens
ggcuggagugca

SEQ ID NO: 45116 - RNA, 14 nt, Homo sapiens
ggcuggagugcagu

SEQ ID NO: 45117 - RNA, 15 nt, Homo sapiens
ggcuggagugcagug

SEQ ID NO: 45118 - RNA, 20 nt, Homo sapiens
ggcuggagugcaguggcgca

SEQ ID NO: 45119 - RNA, 16 nt, Homo sapiens
ggcuggcaccgcugua

SEQ ID NO: 45120 - RNA, 21 nt, Homo sapiens
ggcuggucucgaacugcugga

SEQ ID NO: 45121 - RNA, 16 nt, Homo sapiens
ggcuuagacccucaug

SEQ ID NO: 45122 - RNA, 17 nt, Homo sapiens
ggcuuagacccucaugc

SEQ ID NO: 45123 - RNA, 21 nt, Homo sapiens
ggcuuagacccucaugcugcc

SEQ ID NO: 45124 - RNA, 24 nt, Homo sapiens
ggcuuuaaaacuuauccuccauga

SEQ ID NO: 45125 - RNA, 17 nt, Homo sapiens
ggcuuuagggaccugcu

SEQ ID NO: 45126 - RNA, 14 nt, Homo sapiens
ggcuuuuauugcca

SEQ ID NO: 45127 - RNA, 11 nt, Homo sapiens
gggaaacugcc

SEQ ID NO: 45128 - RNA, 16 nt, Homo sapiens
gggaaagaagagccgg

SEQ ID NO: 45129 - RNA, 17 nt, Homo sapiens
gggaaagaagagccgga

SEQ ID NO: 45130 - RNA, 14 nt, Homo sapiens
gggaaagggcuguu

SEQ ID NO: 45131 - RNA, 21 nt, Homo sapiens
gggaaauccacacugagcuga

SEQ ID NO: 45132 - RNA, 20 nt, Homo sapiens
gggaaugaagauacugaaau

SEQ ID NO: 45133 - RNA, 19 nt, Homo sapiens
gggacagucaccucaugga

SEQ ID NO: 45134 - RNA, 18 nt, Homo sapiens
gggacauuugcucaugga

SEQ ID NO: 45135 - RNA, 16 nt, Homo sapiens
gggaccucuccaugau

SEQ ID NO: 45136 - RNA, 14 nt, Homo sapiens
gggaccugcuguuu

SEQ ID NO: 45137 - RNA, 11 nt, Homo sapiens
gggaccugggc

SEQ ID NO: 45138 - RNA, 20 nt, Homo sapiens
gggagcuuuuguagaaguca

SEQ ID NO: 45139 - RNA, 20 nt, Homo sapiens
gggaggcagagguugcagug

SEQ ID NO: 45140 - RNA, 14 nt, Homo sapiens
gggaggggcgcucg

SEQ ID NO: 45141 - RNA, 15 nt, Homo sapiens
gggaggggcgcucgc

SEQ ID NO: 45142 - RNA, 10 nt, Homo sapiens
gggaguggcg

SEQ ID NO: 45143 - RNA, 13 nt, Homo sapiens
gggaguggcgcgc

SEQ ID NO: 45144 - RNA, 14 nt, Homo sapiens
gggaguggcgcgcg

SEQ ID NO: 45145 - RNA, 16 nt, Homo sapiens
gggaguggcgcgcgcc

SEQ ID NO: 45146 - RNA, 16 nt, Homo sapiens
gggauuguaaaauggu

SEQ ID NO: 45147 - RNA, 16 nt, Homo sapiens
gggcaagggaccugcu

SEQ ID NO: 45148 - RNA, 19 nt, Homo sapiens
gggcauggguuuuauuaua

SEQ ID NO: 45149 - RNA, 12 nt, Homo sapiens
gggccgacggag

SEQ ID NO: 45150 - RNA, 14 nt, Homo sapiens
gggccgacggagcc

SEQ ID NO: 45151 - RNA, 15 nt, Homo sapiens
gggccgacggagccg

SEQ ID NO: 45152 - RNA, 18 nt, Homo sapiens
gggccgacggagccggga

SEQ ID NO: 45153 - RNA, 12 nt, Homo sapiens
gggccuggcugg

SEQ ID NO: 45154 - RNA, 17 nt, Homo sapiens
gggccuggcugggagug

SEQ ID NO: 45155 - RNA, 14 nt, Homo sapiens
gggcgcggggcggg

SEQ ID NO: 45156 - RNA, 12 nt, Homo sapiens
gggcgcgguggc

SEQ ID NO: 45157 - RNA, 15 nt, Homo sapiens
gggcgcgugcaggca

SEQ ID NO: 45158 - RNA, 21 nt, Homo sapiens
gggcgcgugcaggcagcagga

SEQ ID NO: 45159 - RNA, 15 nt, Homo sapiens
gggcgcucgcuuccg

SEQ ID NO: 45160 - RNA, 12 nt, Homo sapiens
gggcggcggccc

SEQ ID NO: 45161 - RNA, 22 nt, Homo sapiens
gggcgggacacaggcuccaaac

SEQ ID NO: 45162 - RNA, 13 nt, Homo sapiens
gggcuacgcgcgc

SEQ ID NO: 45163 - RNA, 14 nt, Homo sapiens
gggcuacgcgcgcu

SEQ ID NO: 45164 - RNA, 13 nt, Homo sapiens
gggcugaugcagu

SEQ ID NO: 45165 - RNA, 20 nt, Homo sapiens
gggcuuuagggaccugcugu

SEQ ID NO: 45166 - RNA, 21 nt, Homo sapiens
gggcuuuagggaccugcuguu

SEQ ID NO: 45167 - RNA, 12 nt, Homo sapiens
ggggagcgagcc

SEQ ID NO: 45168 - RNA, 12 nt, Homo sapiens
ggggaggggcgc

SEQ ID NO: 45169 - RNA, 12 nt, Homo sapiens
ggggcgcgugca

SEQ ID NO: 45170 - RNA, 11 nt, Homo sapiens
ggggcgcucgc

SEQ ID NO: 45171 - RNA, 14 nt, Homo sapiens
ggggcgcucgcuuc

SEQ ID NO: 45172 - RNA, 17 nt, Homo sapiens
ggggcuuuagggaccug

SEQ ID NO: 45173 - RNA, 17 nt, Homo sapiens
gggguggguggggcagu

SEQ ID NO: 45174 - RNA, 19 nt, Homo sapiens
gggguuugccaugcuggcc

SEQ ID NO: 45175 - RNA, 14 nt, Homo sapiens
gggucucagugucc

SEQ ID NO: 45176 - RNA, 19 nt, Homo sapiens
gggucucccucuguugcca

SEQ ID NO: 45177 - RNA, 16 nt, Homo sapiens
gggugaacugcagcga

SEQ ID NO: 45178 - RNA, 14 nt, Homo sapiens
ggguggggcagugc

SEQ ID NO: 45179 - RNA, 15 nt, Homo sapiens
ggguggggcagugcu

SEQ ID NO: 45180 - RNA, 12 nt, Homo sapiens
ggguuucacaag

SEQ ID NO: 45181 - RNA, 16 nt, Homo sapiens
ggguuugccaugcugg

SEQ ID NO: 45182 - RNA, 12 nt, Homo sapiens
gguaaccucauu

SEQ ID NO: 45183 - RNA, 14 nt, Homo sapiens
gguacauauuucuu

SEQ ID NO: 45184 - RNA, 18 nt, Homo sapiens
gguauauaaauuuuccca

SEQ ID NO: 45185 - RNA, 19 nt, Homo sapiens
gguaucaaccaaauggagu

SEQ ID NO: 45186 - RNA, 12 nt, Homo sapiens
gguaugauuaac

SEQ ID NO: 45187 - RNA, 19 nt, Homo sapiens
gguauuuauugagcaccug

SEQ ID NO: 45188 - RNA, 19 nt, Homo sapiens
gguauuuuaaucaccaagg

SEQ ID NO: 45189 - RNA, 14 nt, Homo sapiens
ggucaacaugguga

SEQ ID NO: 45190 - RNA, 15 nt, Homo sapiens
ggucaacauggugaa

SEQ ID NO: 45191 - RNA, 20 nt, Homo sapiens
ggucaauuuuguuauguaua

SEQ ID NO: 45192 - RNA, 23 nt, Homo sapiens
ggucacuuuacuguccccaucau

SEQ ID NO: 45193 - RNA, 17 nt, Homo sapiens
gguccgaagucuuccau

SEQ ID NO: 45194 - RNA, 15 nt, Homo sapiens
gguccgggucgcagg

SEQ ID NO: 45195 - RNA, 15 nt, Homo sapiens
gguccuaagucccug

SEQ ID NO: 45196 - RNA, 16 nt, Homo sapiens
gguccuaagucccugc

SEQ ID NO: 45197 - RNA, 19 nt, Homo sapiens
gguccuaagucccugcugc

SEQ ID NO: 45198 - RNA, 17 nt, Homo sapiens
gguccuugcugcaccug

SEQ ID NO: 45199 - RNA, 18 nt, Homo sapiens
ggucgcaggaccaucccg

SEQ ID NO: 45200 - RNA, 22 nt, Homo sapiens
ggucgcaggaccaucccggccg

SEQ ID NO: 45201 - RNA, 23 nt, Homo sapiens
ggucgcaggaccaucccggccgg

SEQ ID NO: 45202 - RNA, 13 nt, Homo sapiens
ggucggguuuuau

SEQ ID NO: 45203 - RNA, 23 nt, Homo sapiens
ggucggguuuuauuguuuaaaau

SEQ ID NO: 45204 - RNA, 17 nt, Homo sapiens
ggucgucgucuugacuu

SEQ ID NO: 45205 - RNA, 23 nt, Homo sapiens
ggucgucgucuugacuuuggcaa

SEQ ID NO: 45206 - RNA, 21 nt, Homo sapiens
ggucuaccaaaaaucucaaua

SEQ ID NO: 45207 - RNA, 16 nt, Homo sapiens
ggucuaccuguucgcg

SEQ ID NO: 45208 - RNA, 19 nt, Homo sapiens
ggucucgaacugcuggauu

SEQ ID NO: 45209 - RNA, 20 nt, Homo sapiens
ggucuugauaaauggcuucc

SEQ ID NO: 45210 - RNA, 16 nt, Homo sapiens
ggugaaacccugucuc

SEQ ID NO: 45211 - RNA, 17 nt, Homo sapiens
ggugaacugcagcgagu

SEQ ID NO: 45212 - RNA, 14 nt, Homo sapiens
ggugagggcuugag

SEQ ID NO: 45213 - RNA, 18 nt, Homo sapiens
ggugagguaccagccuug

SEQ ID NO: 45214 - RNA, 15 nt, Homo sapiens
gguggcgcgcaccug

SEQ ID NO: 45215 - RNA, 23 nt, Homo sapiens
gguggcgcuggcugcgcucggcc

SEQ ID NO: 45216 - RNA, 17 nt, Homo sapiens
gguggcucacgccugua

SEQ ID NO: 45217 - RNA, 14 nt, Homo sapiens
gguggggcagugcu

SEQ ID NO: 45218 - RNA, 15 nt, Homo sapiens
gguggggcagugcuu

SEQ ID NO: 45219 - RNA, 13 nt, Homo sapiens
gguggguggggca

SEQ ID NO: 45220 - RNA, 14 nt, Homo sapiens
ggugugaccacugc

SEQ ID NO: 45221 - RNA, 23 nt, Homo sapiens
gguuaccaguaacggaacaguau

SEQ ID NO: 45222 - RNA, 17 nt, Homo sapiens
gguuaccuuuguuccca

SEQ ID NO: 45223 - RNA, 19 nt, Homo sapiens
gguuaccuuuguucccaaa

SEQ ID NO: 45224 - RNA, 22 nt, Homo sapiens
gguucuaggccgggcgcggugg

SEQ ID NO: 45225 - RNA, 19 nt, Homo sapiens
gguucuucuuggucucagu

SEQ ID NO: 45226 - RNA, 13 nt, Homo sapiens
gguugauuucagc

SEQ ID NO: 45227 - RNA, 20 nt, Homo sapiens
gguuucacaagugaaaaaca

SEQ ID NO: 45228 - RNA, 21 nt, Homo sapiens
gguuucacaagugaaaaacau

SEQ ID NO: 45229 - RNA, 19 nt, Homo sapiens
gguuugccaugcuggccag

SEQ ID NO: 45230 - RNA, 14 nt, Homo sapiens
gguuuggacaaaau

SEQ ID NO: 45231 - RNA, 16 nt, Homo sapiens
guaaaaccacagcagu

SEQ ID NO: 45232 - RNA, 16 nt, Homo sapiens
guaaaauggagacacc

SEQ ID NO: 45233 - RNA, 13 nt, Homo sapiens
guaaaauugaaag

SEQ ID NO: 45234 - RNA, 15 nt, Homo sapiens
guaaacaaaggaauu

SEQ ID NO: 45235 - RNA, 18 nt, Homo sapiens
guaaacggucucucacuu

SEQ ID NO: 45236 - RNA, 16 nt, Homo sapiens
guaaagcuuugugcag

SEQ ID NO: 45237 - RNA, 17 nt, Homo sapiens
guaaaguacagacuuuu

SEQ ID NO: 45238 - RNA, 18 nt, Homo sapiens
guaaaugggggugcauuu

SEQ ID NO: 45239 - RNA, 20 nt, Homo sapiens
guaaaugggggugcauuuga

SEQ ID NO: 45240 - RNA, 16 nt, Homo sapiens
guaacuggcaguuuuc

SEQ ID NO: 45241 - RNA, 23 nt, Homo sapiens
guaacuguuuagaugaaugucag

SEQ ID NO: 45242 - RNA, 15 nt, Homo sapiens
guaagggaaacugcc

SEQ ID NO: 45243 - RNA, 17 nt, Homo sapiens
guaagggaaacugccag

SEQ ID NO: 45244 - RNA, 18 nt, Homo sapiens
guaagggaaacugccagc

SEQ ID NO: 45245 - RNA, 18 nt, Homo sapiens
guaaguuuaugcauacag

SEQ ID NO: 45246 - RNA, 20 nt, Homo sapiens
guaauuggaaaggcagcucu

SEQ ID NO: 45247 - RNA, 17 nt, Homo sapiens
guaauuugugauacaau

SEQ ID NO: 45248 - RNA, 20 nt, Homo sapiens
guaauuugugauacaaugcu

SEQ ID NO: 45249 - RNA, 19 nt, Homo sapiens
guaauuuuaaguaauuuca

SEQ ID NO: 45250 - RNA, 23 nt, Homo sapiens
guaauuuuuuuaucgucacugcu

SEQ ID NO: 45251 - RNA, 19 nt, Homo sapiens
guacaucaaugauaaugcu

SEQ ID NO: 45252 - RNA, 17 nt, Homo sapiens
guacauguuaaacuuac

SEQ ID NO: 45253 - RNA, 22 nt, Homo sapiens
guacauuuccaaauucacaagu

SEQ ID NO: 45254 - RNA, 22 nt, Homo sapiens
guacauuuuuuuuuucaauaaa

SEQ ID NO: 45255 - RNA, 23 nt, Homo sapiens
guacauuuuuuuuuucaauaaaa

SEQ ID NO: 45256 - RNA, 16 nt, Homo sapiens
guaccgcaaugugacu

SEQ ID NO: 45257 - RNA, 14 nt, Homo sapiens
guaccucucuuaua

SEQ ID NO: 45258 - RNA, 20 nt, Homo sapiens
guaccuucucaccugugaga

SEQ ID NO: 45259 - RNA, 18 nt, Homo sapiens
guacgcgagcgcgcgcgc

SEQ ID NO: 45260 - RNA, 19 nt, Homo sapiens
guacgcgagcgcgcgcgcc

SEQ ID NO: 45261 - RNA, 15 nt, Homo sapiens
guacguugugcauuu

SEQ ID NO: 45262 - RNA, 15 nt, Homo sapiens
guacuccagccuggg

SEQ ID NO: 45263 - RNA, 16 nt, Homo sapiens
guacuccagccugggu

SEQ ID NO: 45264 - RNA, 16 nt, Homo sapiens
guacucugaaaguuuu

SEQ ID NO: 45265 - RNA, 15 nt, Homo sapiens
guacuuuuuccagac

SEQ ID NO: 45266 - RNA, 15 nt, Homo sapiens
guagauaaacucaga

SEQ ID NO: 45267 - RNA, 16 nt, Homo sapiens
guagauaaacucagaa

SEQ ID NO: 45268 - RNA, 17 nt, Homo sapiens
guagauaaacucagaaa

SEQ ID NO: 45269 - RNA, 16 nt, Homo sapiens
guagauaugaggcauu

SEQ ID NO: 45270 - RNA, 13 nt, Homo sapiens
guagcagcagcau

SEQ ID NO: 45271 - RNA, 15 nt, Homo sapiens
guagcguacaucaau

SEQ ID NO: 45272 - RNA, 18 nt, Homo sapiens
guagcucucugaccuccu

SEQ ID NO: 45273 - RNA, 21 nt, Homo sapiens
guauauaaauuuucccaaaac

SEQ ID NO: 45274 - RNA, 17 nt, Homo sapiens
guaucaaaagaaagaaa

SEQ ID NO: 45275 - RNA, 18 nt, Homo sapiens
guaucaaccaaauggagu

SEQ ID NO: 45276 - RNA, 16 nt, Homo sapiens
guauccuucagccuga

SEQ ID NO: 45277 - RNA, 22 nt, Homo sapiens
guaucuuguuuuuccacuacug

SEQ ID NO: 45278 - RNA, 13 nt, Homo sapiens
guaugaaaauguc

SEQ ID NO: 45279 - RNA, 14 nt, Homo sapiens
guaugaaaauguca

SEQ ID NO: 45280 - RNA, 18 nt, Homo sapiens
guaugaaaaugucauugu

SEQ ID NO: 45281 - RNA, 19 nt, Homo sapiens
guaugaaaaugucauuguu

SEQ ID NO: 45282 - RNA, 14 nt, Homo sapiens
guaugaggcauuug

SEQ ID NO: 45283 - RNA, 15 nt, Homo sapiens
guaugaggcauuugu

SEQ ID NO: 45284 - RNA, 13 nt, Homo sapiens
guaugauucccag

SEQ ID NO: 45285 - RNA, 20 nt, Homo sapiens
guaugcacuaaucaauacuu

SEQ ID NO: 45286 - RNA, 13 nt, Homo sapiens
guauggcaaacug

SEQ ID NO: 45287 - RNA, 17 nt, Homo sapiens
guauggcaaacugccau

SEQ ID NO: 45288 - RNA, 13 nt, Homo sapiens
guauggcagcuuu

SEQ ID NO: 45289 - RNA, 18 nt, Homo sapiens
guauucaaacaauuugaa

SEQ ID NO: 45290 - RNA, 18 nt, Homo sapiens
guauucccuuuugcugcc

SEQ ID NO: 45291 - RNA, 19 nt, Homo sapiens
guauucucuccuguaccuc

SEQ ID NO: 45292 - RNA, 18 nt, Homo sapiens
guauuuauugagcaccug

SEQ ID NO: 45293 - RNA, 19 nt, Homo sapiens
guauuucuaugaaauauua

SEQ ID NO: 45294 - RNA, 21 nt, Homo sapiens
gucaaacccaaguuaguucaa

SEQ ID NO: 45295 - RNA, 22 nt, Homo sapiens
gucaaacccaaguuaguucaau

SEQ ID NO: 45296 - RNA, 16 nt, Homo sapiens
gucaaauugugugaaa

SEQ ID NO: 45297 - RNA, 18 nt, Homo sapiens
gucaaggcuuagacccuc

SEQ ID NO: 45298 - RNA, 15 nt, Homo sapiens
gucaaugcagccccc

SEQ ID NO: 45299 - RNA, 16 nt, Homo sapiens
gucaaugcagccccca

SEQ ID NO: 45300 - RNA, 15 nt, Homo sapiens
gucacagaggaucug

SEQ ID NO: 45301 - RNA, 16 nt, Homo sapiens
gucacagaggaucugc

SEQ ID NO: 45302 - RNA, 19 nt, Homo sapiens
gucacagaggaucugcuug

SEQ ID NO: 45303 - RNA, 15 nt, Homo sapiens
gucacuagggcaggg

SEQ ID NO: 45304 - RNA, 15 nt, Homo sapiens
gucacuuuacugucc

SEQ ID NO: 45305 - RNA, 11 nt, Homo sapiens
gucagccagcc

SEQ ID NO: 45306 - RNA, 22 nt, Homo sapiens
gucauuauguuaauauuucuga

SEQ ID NO: 45307 - RNA, 20 nt, Homo sapiens
gucauucagauaugauucaa

SEQ ID NO: 45308 - RNA, 13 nt, Homo sapiens
gucauuuguuaau

SEQ ID NO: 45309 - RNA, 16 nt, Homo sapiens
guccacugguucuucu

SEQ ID NO: 45310 - RNA, 23 nt, Homo sapiens
guccauucuuccucccauucagg

SEQ ID NO: 45311 - RNA, 13 nt, Homo sapiens
gucccagcgaggg

SEQ ID NO: 45312 - RNA, 17 nt, Homo sapiens
guccccagagcuacagg

SEQ ID NO: 45313 - RNA, 19 nt, Homo sapiens
guccccagagcuacaggcc

SEQ ID NO: 45314 - RNA, 19 nt, Homo sapiens
gucccuagcccuuacgucc

SEQ ID NO: 45315 - RNA, 20 nt, Homo sapiens
gucccuagcccuuacguccu

SEQ ID NO: 45316 - RNA, 13 nt, Homo sapiens
gucccugcugccc

SEQ ID NO: 45317 - RNA, 17 nt, Homo sapiens
guccgggucgcaggacc

SEQ ID NO: 45318 - RNA, 20 nt, Homo sapiens
guccgggucgcaggaccauc

SEQ ID NO: 45319 - RNA, 20 nt, Homo sapiens
guccuaagucccugcugccc

SEQ ID NO: 45320 - RNA, 16 nt, Homo sapiens
guccuauuauauucau

SEQ ID NO: 45321 - RNA, 20 nt, Homo sapiens
gucgcaggaccaucccggcc

SEQ ID NO: 45322 - RNA, 22 nt, Homo sapiens
gucgcaggaccaucccggccgg

SEQ ID NO: 45323 - RNA, 24 nt, Homo sapiens
gucgcaggaccaucccggccggcg

SEQ ID NO: 45324 - RNA, 12 nt, Homo sapiens
gucgccggcauc

SEQ ID NO: 45325 - RNA, 14 nt, Homo sapiens
gucgccggcaucuu

SEQ ID NO: 45326 - RNA, 19 nt, Homo sapiens
gucuaccuguucgcgcgcc

SEQ ID NO: 45327 - RNA, 22 nt, Homo sapiens
gucuaccuguucgcgcgccucc

SEQ ID NO: 45328 - RNA, 11 nt, Homo sapiens
gucuagugaaa

SEQ ID NO: 45329 - RNA, 15 nt, Homo sapiens
gucucaguccaugaa

SEQ ID NO: 45330 - RNA, 16 nt, Homo sapiens
gucucaguccaugaag

SEQ ID NO: 45331 - RNA, 14 nt, Homo sapiens
gucucccaaagugc

SEQ ID NO: 45332 - RNA, 16 nt, Homo sapiens
gucucccaaagugcug

SEQ ID NO: 45333 - RNA, 21 nt, Homo sapiens
gucucccucuguugccaaggc

SEQ ID NO: 45334 - RNA, 23 nt, Homo sapiens
gucucgugguaggacuguagaaa

SEQ ID NO: 45335 - RNA, 18 nt, Homo sapiens
gucucugaagugaaacug

SEQ ID NO: 45336 - RNA, 21 nt, Homo sapiens
gucucugaagugaaacugcuu

SEQ ID NO: 45337 - RNA, 22 nt, Homo sapiens
gucugaaauuuucuagaauacu

SEQ ID NO: 45338 - RNA, 15 nt, Homo sapiens
gucugacuguuucca

SEQ ID NO: 45339 - RNA, 21 nt, Homo sapiens
gucuuaauuaaaagaauauuu

SEQ ID NO: 45340 - RNA, 22 nt, Homo sapiens
gucuucacaacagauuauuacc

SEQ ID NO: 45341 - RNA, 13 nt, Homo sapiens
gucuuguguuucu

SEQ ID NO: 45342 - RNA, 21 nt, Homo sapiens
gucuuguguuucuuuaguuuu

SEQ ID NO: 45343 - RNA, 15 nt, Homo sapiens
gugaaagguacuuca

SEQ ID NO: 45344 - RNA, 20 nt, Homo sapiens
gugaaauaaaaguagaauaa

SEQ ID NO: 45345 - RNA, 14 nt, Homo sapiens
gugaaauaagccag

SEQ ID NO: 45346 - RNA, 20 nt, Homo sapiens
gugaaauaagccagacauca

SEQ ID NO: 45347 - RNA, 23 nt, Homo sapiens
gugaacaaauuuacagagacaga

SEQ ID NO: 45348 - RNA, 14 nt, Homo sapiens
gugaacacaucagc

SEQ ID NO: 45349 - RNA, 15 nt, Homo sapiens
gugaacacaucagcu

SEQ ID NO: 45350 - RNA, 23 nt, Homo sapiens
gugaacugcagcgaguacuuccc

SEQ ID NO: 45351 - RNA, 16 nt, Homo sapiens
gugaaguauacuguau

SEQ ID NO: 45352 - RNA, 16 nt, Homo sapiens
gugacaagcucacaga

SEQ ID NO: 45353 - RNA, 17 nt, Homo sapiens
gugaccugacagcccaa

SEQ ID NO: 45354 - RNA, 21 nt, Homo sapiens
gugaccugacagcccaagggu

SEQ ID NO: 45355 - RNA, 17 nt, Homo sapiens
gugacuauuauauuucc

SEQ ID NO: 45356 - RNA, 13 nt, Homo sapiens
gugacuggccugc

SEQ ID NO: 45357 - RNA, 16 nt, Homo sapiens
gugagacagcucugca

SEQ ID NO: 45358 - RNA, 17 nt, Homo sapiens
gugagacagcucugcau

SEQ ID NO: 45359 - RNA, 18 nt, Homo sapiens
gugagaccaaauugagcu

SEQ ID NO: 45360 - RNA, 20 nt, Homo sapiens
gugagaccaaauugagcuag

SEQ ID NO: 45361 - RNA, 14 nt, Homo sapiens
gugagaucaaugug

SEQ ID NO: 45362 - RNA, 12 nt, Homo sapiens
gugagccaccaa

SEQ ID NO: 45363 - RNA, 13 nt, Homo sapiens
gugagccaccaaa

SEQ ID NO: 45364 - RNA, 20 nt, Homo sapiens
gugagccaccaaacccggcc

SEQ ID NO: 45365 - RNA, 13 nt, Homo sapiens
gugauacaaugcu

SEQ ID NO: 45366 - RNA, 16 nt, Homo sapiens
gugauuaccagggacu

SEQ ID NO: 45367 - RNA, 17 nt, Homo sapiens
gugauuaccagggacug

SEQ ID NO: 45368 - RNA, 20 nt, Homo sapiens
gugauuacccucugggucuc

SEQ ID NO: 45369 - RNA, 23 nt, Homo sapiens
gugauucccuccugcuacucugu

SEQ ID NO: 45370 - RNA, 12 nt, Homo sapiens
gugcaauaugug

SEQ ID NO: 45371 - RNA, 13 nt, Homo sapiens
gugcaauauguga

SEQ ID NO: 45372 - RNA, 14 nt, Homo sapiens
gugcacauauccuu

SEQ ID NO: 45373 - RNA, 15 nt, Homo sapiens
gugcagauucuuuac

SEQ ID NO: 45374 - RNA, 15 nt, Homo sapiens
gugcauauuuuauua

SEQ ID NO: 45375 - RNA, 17 nt, Homo sapiens
gugcauauuuuauuaua

SEQ ID NO: 45376 - RNA, 20 nt, Homo sapiens
gugcauuuggugguuucaga

SEQ ID NO: 45377 - RNA, 13 nt, Homo sapiens
gugccucaccccu

SEQ ID NO: 45378 - RNA, 23 nt, Homo sapiens
gugcggccuggucuaccuguucg

SEQ ID NO: 45379 - RNA, 18 nt, Homo sapiens
gugcuacaaaaacacagc

SEQ ID NO: 45380 - RNA, 20 nt, Homo sapiens
gugcugggaauuacaggcgu

SEQ ID NO: 45381 - RNA, 21 nt, Homo sapiens
gugcugggaauuacaggcgug

SEQ ID NO: 45382 - RNA, 12 nt, Homo sapiens
gugcuuggccca

SEQ ID NO: 45383 - RNA, 14 nt, Homo sapiens
gugcuuggcccagg

SEQ ID NO: 45384 - RNA, 15 nt, Homo sapiens
gugcuuggcccagga

SEQ ID NO: 45385 - RNA, 23 nt, Homo sapiens
gugcuuuaauggcaugucagaca

SEQ ID NO: 45386 - RNA, 20 nt, Homo sapiens
gugcuuuuaaaaaaaaauac

SEQ ID NO: 45387 - RNA, 21 nt, Homo sapiens
gugcuuuuaaaaaaaaauacu

SEQ ID NO: 45388 - RNA, 16 nt, Homo sapiens
guggaacaguuaccuc

SEQ ID NO: 45389 - RNA, 13 nt, Homo sapiens
guggagggggcgc

SEQ ID NO: 45390 - RNA, 18 nt, Homo sapiens
guggagggggcgcgugca

SEQ ID NO: 45391 - RNA, 12 nt, Homo sapiens
guggccagcuug

SEQ ID NO: 45392 - RNA, 12 nt, Homo sapiens
guggcgcgcgcc

SEQ ID NO: 45393 - RNA, 16 nt, Homo sapiens
guggcgcgcgccacca

SEQ ID NO: 45394 - RNA, 15 nt, Homo sapiens
guggcgcuggcugcg

SEQ ID NO: 45395 - RNA, 20 nt, Homo sapiens
guggcgcuggcugcgcucgg

SEQ ID NO: 45396 - RNA, 23 nt, Homo sapiens
gugggacagucaccucauggaau

SEQ ID NO: 45397 - RNA, 20 nt, Homo sapiens
gugggccugagaccaaggcc

SEQ ID NO: 45398 - RNA, 11 nt, Homo sapiens
gugggcucugg

SEQ ID NO: 45399 - RNA, 20 nt, Homo sapiens
guggggcagugcuuggccca

SEQ ID NO: 45400 - RNA, 21 nt, Homo sapiens
guggggcagugcuuggcccag

SEQ ID NO: 45401 - RNA, 23 nt, Homo sapiens
guggggcagugcuuggcccagga

SEQ ID NO: 45402 - RNA, 19 nt, Homo sapiens
guguacagucuuguauuaa

SEQ ID NO: 45403 - RNA, 16 nt, Homo sapiens
gugucaaugcagcccc

SEQ ID NO: 45404 - RNA, 17 nt, Homo sapiens
gugucaaugcagccccc

SEQ ID NO: 45405 - RNA, 15 nt, Homo sapiens
gugucaguggaugcu

SEQ ID NO: 45406 - RNA, 15 nt, Homo sapiens
gugucuggcacuugg

SEQ ID NO: 45407 - RNA, 16 nt, Homo sapiens
gugucuuaauuaaaag

SEQ ID NO: 45408 - RNA, 22 nt, Homo sapiens
gugugaccacugcagaagacag

SEQ ID NO: 45409 - RNA, 14 nt, Homo sapiens
gugugacucauuaa

SEQ ID NO: 45410 - RNA, 12 nt, Homo sapiens
gugugcuggcuu

SEQ ID NO: 45411 - RNA, 23 nt, Homo sapiens
guguguuuauuucacuugaugau

SEQ ID NO: 45412 - RNA, 13 nt, Homo sapiens
guguuugagcauc

SEQ ID NO: 45413 - RNA, 14 nt, Homo sapiens
guuaaaauaccagc

SEQ ID NO: 45414 - RNA, 22 nt, Homo sapiens
guuaagcacuuuaacacagugu

SEQ ID NO: 45415 - RNA, 18 nt, Homo sapiens
guuaaguaucagcuacaa

SEQ ID NO: 45416 - RNA, 23 nt, Homo sapiens
guuaguucaauccugauucauau

SEQ ID NO: 45417 - RNA, 15 nt, Homo sapiens
guuaucuucacuuuu

SEQ ID NO: 45418 - RNA, 16 nt, Homo sapiens
guuaucuucacuuuua

SEQ ID NO: 45419 - RNA, 17 nt, Homo sapiens
guuaucuucacuuuuau

SEQ ID NO: 45420 - RNA, 16 nt, Homo sapiens
guuaugauuaaguaau

SEQ ID NO: 45421 - RNA, 15 nt, Homo sapiens
guuauggcuuaauga

SEQ ID NO: 45422 - RNA, 13 nt, Homo sapiens
guuauuaaaaauc

SEQ ID NO: 45423 - RNA, 15 nt, Homo sapiens
guuauuaaaaaucuc

SEQ ID NO: 45424 - RNA, 19 nt, Homo sapiens
guuauuuagggaacugcuu

SEQ ID NO: 45425 - RNA, 20 nt, Homo sapiens
guuauuuagggaacugcuug

SEQ ID NO: 45426 - RNA, 21 nt, Homo sapiens
guuauuuagggaacugcuuga

SEQ ID NO: 45427 - RNA, 15 nt, Homo sapiens
guuauuuauaaucac

SEQ ID NO: 45428 - RNA, 19 nt, Homo sapiens
guuauuuauugaaaugauu

SEQ ID NO: 45429 - RNA, 11 nt, Homo sapiens
guuauuuuuaa

SEQ ID NO: 45430 - RNA, 18 nt, Homo sapiens
guuauuuuuaauuugguu

SEQ ID NO: 45431 - RNA, 21 nt, Homo sapiens
guucaaucuggauucauauuu

SEQ ID NO: 45432 - RNA, 20 nt, Homo sapiens
guucacagccagacuggcac

SEQ ID NO: 45433 - RNA, 18 nt, Homo sapiens
guuccuaaccagccuggu

SEQ ID NO: 45434 - RNA, 19 nt, Homo sapiens
guuccuaaccagccugguc

SEQ ID NO: 45435 - RNA, 22 nt, Homo sapiens
guuccugagaccagccaaccug

SEQ ID NO: 45436 - RNA, 10 nt, Homo sapiens
guucgcgcgc

SEQ ID NO: 45437 - RNA, 13 nt, Homo sapiens
guucgcgcgccuc

SEQ ID NO: 45438 - RNA, 15 nt, Homo sapiens
guucuaggccgggcg

SEQ ID NO: 45439 - RNA, 12 nt, Homo sapiens
guucuauaacaa

SEQ ID NO: 45440 - RNA, 13 nt, Homo sapiens
guucuauaacaac

SEQ ID NO: 45441 - RNA, 14 nt, Homo sapiens
guucuauaacaaca

SEQ ID NO: 45442 - RNA, 20 nt, Homo sapiens
guucucuucuuuaaagggau

SEQ ID NO: 45443 - RNA, 21 nt, Homo sapiens
guucucuucuuuaaagggaug

SEQ ID NO: 45444 - RNA, 11 nt, Homo sapiens
guucugaagaa

SEQ ID NO: 45445 - RNA, 23 nt, Homo sapiens
guucuucccuuuuacauacugcu

SEQ ID NO: 45446 - RNA, 18 nt, Homo sapiens
guucuucuuggucucagu

SEQ ID NO: 45447 - RNA, 16 nt, Homo sapiens
guucuugugaacccaa

SEQ ID NO: 45448 - RNA, 19 nt, Homo sapiens
guucuuuccaaaguacacu

SEQ ID NO: 45449 - RNA, 19 nt, Homo sapiens
guugaaaaaguucugcaga

SEQ ID NO: 45450 - RNA, 12 nt, Homo sapiens
guugaaaagacu

SEQ ID NO: 45451 - RNA, 16 nt, Homo sapiens
guugaagagguuuuaa

SEQ ID NO: 45452 - RNA, 15 nt, Homo sapiens
guugacaacugugac

SEQ ID NO: 45453 - RNA, 19 nt, Homo sapiens
guugacaugggacauuugc

SEQ ID NO: 45454 - RNA, 22 nt, Homo sapiens
guugagcuguuuucccugaccu

SEQ ID NO: 45455 - RNA, 22 nt, Homo sapiens
guugauggaaauacacuguuau

SEQ ID NO: 45456 - RNA, 15 nt, Homo sapiens
guugccaaggcugga

SEQ ID NO: 45457 - RNA, 19 nt, Homo sapiens
guugccaaggcuggagugc

SEQ ID NO: 45458 - RNA, 18 nt, Homo sapiens
guugccuaauuuguuuuc

SEQ ID NO: 45459 - RNA, 23 nt, Homo sapiens
guugcuaucaauccaagaacuua

SEQ ID NO: 45460 - RNA, 16 nt, Homo sapiens
guuggaaaaugugcaa

SEQ ID NO: 45461 - RNA, 18 nt, Homo sapiens
guuggaaaaugugcaaua

SEQ ID NO: 45462 - RNA, 19 nt, Homo sapiens
guugucaaugggaaaaaac

SEQ ID NO: 45463 - RNA, 18 nt, Homo sapiens
guuguggggaugaacuuu

SEQ ID NO: 45464 - RNA, 19 nt, Homo sapiens
guuguuaauaaaaguacau

SEQ ID NO: 45465 - RNA, 21 nt, Homo sapiens
guuguuaauaaaaguacaugu

SEQ ID NO: 45466 - RNA, 14 nt, Homo sapiens
guuuaaauggucaa

SEQ ID NO: 45467 - RNA, 13 nt, Homo sapiens
guuuaauguuaau

SEQ ID NO: 45468 - RNA, 16 nt, Homo sapiens
guuuagaaagcuugcc

SEQ ID NO: 45469 - RNA, 20 nt, Homo sapiens
guuuagaaagcuugcccugg

SEQ ID NO: 45470 - RNA, 17 nt, Homo sapiens
guuuagaugaaugucag

SEQ ID NO: 45471 - RNA, 19 nt, Homo sapiens
guuuauauagaaauguauu

SEQ ID NO: 45472 - RNA, 22 nt, Homo sapiens
guuuaugcauagauaaucucuc

SEQ ID NO: 45473 - RNA, 19 nt, Homo sapiens
guuuauuuguuuuuccagu

SEQ ID NO: 45474 - RNA, 22 nt, Homo sapiens
guuucauaagaauucuguugau

SEQ ID NO: 45475 - RNA, 22 nt, Homo sapiens
guuucauauugaugugugucua

SEQ ID NO: 45476 - RNA, 16 nt, Homo sapiens
guuuccauagggugac

SEQ ID NO: 45477 - RNA, 17 nt, Homo sapiens
guuuccauagggugaca

SEQ ID NO: 45478 - RNA, 16 nt, Homo sapiens
guuuccuagcgcagcc

SEQ ID NO: 45479 - RNA, 21 nt, Homo sapiens
guuucgugaaguauacuguau

SEQ ID NO: 45480 - RNA, 18 nt, Homo sapiens
guuugaaaauaugccugc

SEQ ID NO: 45481 - RNA, 22 nt, Homo sapiens
guuugcagauauucucuaguca

SEQ ID NO: 45482 - RNA, 21 nt, Homo sapiens
guuuggccagaagucaaggcu

SEQ ID NO: 45483 - RNA, 15 nt, Homo sapiens
guuugugauugccau

SEQ ID NO: 45484 - RNA, 16 nt, Homo sapiens
guuugugauugccauu

SEQ ID NO: 45485 - RNA, 22 nt, Homo sapiens
guuuuauaugcuucuguuuuau

SEQ ID NO: 45486 - RNA, 21 nt, Homo sapiens
guuuucacaaagaacaggaaa

SEQ ID NO: 45487 - RNA, 14 nt, Homo sapiens
guuuucauuaucuc

SEQ ID NO: 45488 - RNA, 21 nt, Homo sapiens
guuuucccugaccucccucua

SEQ ID NO: 45489 - RNA, 17 nt, Homo sapiens
guuuuccuucucaucug

SEQ ID NO: 45490 - RNA, 19 nt, Homo sapiens
guuuuccuucucaucugug

SEQ ID NO: 45491 - RNA, 19 nt, Homo sapiens
guuuucugcuuuaauuuca

SEQ ID NO: 45492 - RNA, 16 nt, Homo sapiens
guuuugguugcuuuaa

SEQ ID NO: 45493 - RNA, 19 nt, Homo sapiens
guuuugugaagaaacauuu

SEQ ID NO: 45494 - RNA, 15 nt, Homo sapiens
guuuuuaagccuuaa

SEQ ID NO: 45495 - RNA, 22 nt, Homo sapiens
guuuuuauggcuuuugugcauu

SEQ ID NO: 45496 - RNA, 11 nt, Homo sapiens
guuuuucacau

SEQ ID NO: 45497 - RNA, 13 nt, Homo sapiens
guuuuucacauuu

SEQ ID NO: 45498 - RNA, 21 nt, Homo sapiens
uaaaaaaaaaaaaaaagccaa

SEQ ID NO: 45499 - RNA, 22 nt, Homo sapiens
uaaaaaaaaaaaaaaagccaaa

SEQ ID NO: 45500 - RNA, 19 nt, Homo sapiens
uaaaaaaaaaccugagccc

SEQ ID NO: 45501 - RNA, 17 nt, Homo sapiens
uaaaaaggcauguaauu

SEQ ID NO: 45502 - RNA, 12 nt, Homo sapiens
uaaaacaccuca

SEQ ID NO: 45503 - RNA, 20 nt, Homo sapiens
uaaaacaccucagcugccuc

SEQ ID NO: 45504 - RNA, 17 nt, Homo sapiens
uaaaaccugacagacca

SEQ ID NO: 45505 - RNA, 14 nt, Homo sapiens
uaaaacuaggugcu

SEQ ID NO: 45506 - RNA, 13 nt, Homo sapiens
uaaaacucauuuu

SEQ ID NO: 45507 - RNA, 14 nt, Homo sapiens
uaaaagaaugauua

SEQ ID NO: 45508 - RNA, 11 nt, Homo sapiens
uaaaagcacuu

SEQ ID NO: 45509 - RNA, 19 nt, Homo sapiens
uaaaaggccugucccugca

SEQ ID NO: 45510 - RNA, 14 nt, Homo sapiens
uaaaauaauuuuua

SEQ ID NO: 45511 - RNA, 16 nt, Homo sapiens
uaaaauacacacucaa

SEQ ID NO: 45512 - RNA, 21 nt, Homo sapiens
uaaaauauuuuuaugugcaau

SEQ ID NO: 45513 - RNA, 22 nt, Homo sapiens
uaaaauauuuuuaugugcaaua

SEQ ID NO: 45514 - RNA, 23 nt, Homo sapiens
uaaaauauuuuuaugugcaauaa

SEQ ID NO: 45515 - RNA, 21 nt, Homo sapiens
uaaaaucacaaacucauccau

SEQ ID NO: 45516 - RNA, 19 nt, Homo sapiens
uaaaaucauuucugcauca

SEQ ID NO: 45517 - RNA, 14 nt, Homo sapiens
uaaaaucuaauuca

SEQ ID NO: 45518 - RNA, 18 nt, Homo sapiens
uaaaauuaucaauaucua

SEQ ID NO: 45519 - RNA, 10 nt, Homo sapiens
uaaaauuuuu

SEQ ID NO: 45520 - RNA, 21 nt, Homo sapiens
uaaaauuuuuauguaauuaua

SEQ ID NO: 45521 - RNA, 17 nt, Homo sapiens
uaaacaaaggaauuaug

SEQ ID NO: 45522 - RNA, 19 nt, Homo sapiens
uaaacacuaaaaaggcaug

SEQ ID NO: 45523 - RNA, 15 nt, Homo sapiens
uaaacaguagugaua

SEQ ID NO: 45524 - RNA, 22 nt, Homo sapiens
uaaaccgaacugauguaaguaa

SEQ ID NO: 45525 - RNA, 13 nt, Homo sapiens
uaaaccuaugaau

SEQ ID NO: 45526 - RNA, 17 nt, Homo sapiens
uaaacuguaaagcuuug

SEQ ID NO: 45527 - RNA, 20 nt, Homo sapiens
uaaagaucugcaacuacuau

SEQ ID NO: 45528 - RNA, 16 nt, Homo sapiens
uaaagaugaaugucag

SEQ ID NO: 45529 - RNA, 17 nt, Homo sapiens
uaaagaugaaugucagu

SEQ ID NO: 45530 - RNA, 16 nt, Homo sapiens
uaaagcuuugugcaga

SEQ ID NO: 45531 - RNA, 17 nt, Homo sapiens
uaaagguccuggcaaag

SEQ ID NO: 45532 - RNA, 14 nt, Homo sapiens
uaaaguacagacuu

SEQ ID NO: 45533 - RNA, 16 nt, Homo sapiens
uaaaguacagacuuuu

SEQ ID NO: 45534 - RNA, 14 nt, Homo sapiens
uaaaguaugugcau

SEQ ID NO: 45535 - RNA, 15 nt, Homo sapiens
uaaaguaugugcaua

SEQ ID NO: 45536 - RNA, 16 nt, Homo sapiens
uaaaguaugugcauau

SEQ ID NO: 45537 - RNA, 15 nt, Homo sapiens
uaaaguucuagugac

SEQ ID NO: 45538 - RNA, 13 nt, Homo sapiens
uaaauagcuuuuu

SEQ ID NO: 45539 - RNA, 17 nt, Homo sapiens
uaaauagcuuuuuucuc

SEQ ID NO: 45540 - RNA, 18 nt, Homo sapiens
uaaauaguuuaugauucc

SEQ ID NO: 45541 - RNA, 22 nt, Homo sapiens
uaaauauaaagcaagauaauaa

SEQ ID NO: 45542 - RNA, 23 nt, Homo sapiens
uaaauauaaagcaagauaauaaa

SEQ ID NO: 45543 - RNA, 19 nt, Homo sapiens
uaaauaucuagaaaugaua

SEQ ID NO: 45544 - RNA, 16 nt, Homo sapiens
uaaaugauuucauuca

SEQ ID NO: 45545 - RNA, 17 nt, Homo sapiens
uaaauggaaguaaaugu

SEQ ID NO: 45546 - RNA, 19 nt, Homo sapiens
uaaauguaucuuauucaca

SEQ ID NO: 45547 - RNA, 20 nt, Homo sapiens
uaacaaaauuugaauagccc

SEQ ID NO: 45548 - RNA, 24 nt, Homo sapiens
uaacaaugcuguauuuuaaaagaa

SEQ ID NO: 45549 - RNA, 16 nt, Homo sapiens
uaacaggaauuuucau

SEQ ID NO: 45550 - RNA, 19 nt, Homo sapiens
uaaccaguguuguggauuu

SEQ ID NO: 45551 - RNA, 21 nt, Homo sapiens
uaaccaugcccaagaaugaga

SEQ ID NO: 45552 - RNA, 12 nt, Homo sapiens
uaacuagaauuu

SEQ ID NO: 45553 - RNA, 23 nt, Homo sapiens
uaacucagaaacaucaguuacuc

SEQ ID NO: 45554 - RNA, 18 nt, Homo sapiens
uaacucuaccugcacacu

SEQ ID NO: 45555 - RNA, 16 nt, Homo sapiens
uaacugacaacuugaa

SEQ ID NO: 45556 - RNA, 21 nt, Homo sapiens
uaacugcauugagaacugcau

SEQ ID NO: 45557 - RNA, 15 nt, Homo sapiens
uaagaaaaaggaugc

SEQ ID NO: 45558 - RNA, 16 nt, Homo sapiens
uaagaaaaaggaugca

SEQ ID NO: 45559 - RNA, 19 nt, Homo sapiens
uaagaaaaaggaugcacag

SEQ ID NO: 45560 - RNA, 19 nt, Homo sapiens
uaagaacuaaaauguucua

SEQ ID NO: 45561 - RNA, 23 nt, Homo sapiens
uaagaagacugcauuauauuuau

SEQ ID NO: 45562 - RNA, 21 nt, Homo sapiens
uaagacaaaaagcuacuuauu

SEQ ID NO: 45563 - RNA, 21 nt, Homo sapiens
uaagagauggguuugacaagg

SEQ ID NO: 45564 - RNA, 19 nt, Homo sapiens
uaagauauuaacugagaag

SEQ ID NO: 45565 - RNA, 20 nt, Homo sapiens
uaagcaaaaugugauaugua

SEQ ID NO: 45566 - RNA, 16 nt, Homo sapiens
uaagcaaagacuauga

SEQ ID NO: 45567 - RNA, 20 nt, Homo sapiens
uaagcacuuuaacacagugu

SEQ ID NO: 45568 - RNA, 17 nt, Homo sapiens
uaagcauauacuagaua

SEQ ID NO: 45569 - RNA, 12 nt, Homo sapiens
uaaggaaacugg

SEQ ID NO: 45570 - RNA, 14 nt, Homo sapiens
uaagggaaacugcc

SEQ ID NO: 45571 - RNA, 16 nt, Homo sapiens
uaaggggaauugagga

SEQ ID NO: 45572 - RNA, 13 nt, Homo sapiens
uaaguaauuucag

SEQ ID NO: 45573 - RNA, 13 nt, Homo sapiens
uaagugcagcccc

SEQ ID NO: 45574 - RNA, 14 nt, Homo sapiens
uaaguuacauaagg

SEQ ID NO: 45575 - RNA, 20 nt, Homo sapiens
uaaguuuaugcauacaguaa

SEQ ID NO: 45576 - RNA, 19 nt, Homo sapiens
uaaguuucacagcacuuac

SEQ ID NO: 45577 - RNA, 16 nt, Homo sapiens
uaauaaaaguacaugu

SEQ ID NO: 45578 - RNA, 22 nt, Homo sapiens
uaauagaaauaaaccuaugaau

SEQ ID NO: 45579 - RNA, 18 nt, Homo sapiens
uaauagaauuaauggaau

SEQ ID NO: 45580 - RNA, 18 nt, Homo sapiens
uaauaucaucaguauuga

SEQ ID NO: 45581 - RNA, 22 nt, Homo sapiens
uaauauuucuucgugaugacau

SEQ ID NO: 45582 - RNA, 15 nt, Homo sapiens
uaaucccagcacuuu

SEQ ID NO: 45583 - RNA, 20 nt, Homo sapiens
uaaucccagcuacuugggag

SEQ ID NO: 45584 - RNA, 13 nt, Homo sapiens
uaaucuuucacag

SEQ ID NO: 45585 - RNA, 23 nt, Homo sapiens
uaaugaaaaugaauaucuauuaa

SEQ ID NO: 45586 - RNA, 15 nt, Homo sapiens
uaaugauaacuggaa

SEQ ID NO: 45587 - RNA, 16 nt, Homo sapiens
uaaugauaacuggaaa

SEQ ID NO: 45588 - RNA, 19 nt, Homo sapiens
uaauguagauaaagcacug

SEQ ID NO: 45589 - RNA, 12 nt, Homo sapiens
uaauguuucaaa

SEQ ID NO: 45590 - RNA, 12 nt, Homo sapiens
uaauuaugcagu

SEQ ID NO: 45591 - RNA, 15 nt, Homo sapiens
uaauuauuucacuuu

SEQ ID NO: 45592 - RNA, 17 nt, Homo sapiens
uaauuauuucacuuuag

SEQ ID NO: 45593 - RNA, 21 nt, Homo sapiens
uaauuuaucuugucucugggc

SEQ ID NO: 45594 - RNA, 13 nt, Homo sapiens
uaauuucagaaga

SEQ ID NO: 45595 - RNA, 15 nt, Homo sapiens
uaauuugguuuucac

SEQ ID NO: 45596 - RNA, 18 nt, Homo sapiens
uaauuuuaaguaauuuca

SEQ ID NO: 45597 - RNA, 14 nt, Homo sapiens
uacaaaaacacagc

SEQ ID NO: 45598 - RNA, 16 nt, Homo sapiens
uacaaaaacacagcaa

SEQ ID NO: 45599 - RNA, 18 nt, Homo sapiens
uacaaaaauuagccgggc

SEQ ID NO: 45600 - RNA, 21 nt, Homo sapiens
uacaaaauauagcuuucauaa

SEQ ID NO: 45601 - RNA, 14 nt, Homo sapiens
uacaaggcuuuauc

SEQ ID NO: 45602 - RNA, 20 nt, Homo sapiens
uacaaggcuuuaucucaggg

SEQ ID NO: 45603 - RNA, 19 nt, Homo sapiens
uacaaugcauucugaggua

SEQ ID NO: 45604 - RNA, 17 nt, Homo sapiens
uacaauugaaaugacua

SEQ ID NO: 45605 - RNA, 14 nt, Homo sapiens
uacaauuguaaacu

SEQ ID NO: 45606 - RNA, 20 nt, Homo sapiens
uacacauuuuucagauauaa

SEQ ID NO: 45607 - RNA, 16 nt, Homo sapiens
uacacugccuucucaa

SEQ ID NO: 45608 - RNA, 17 nt, Homo sapiens
uacagaaaaguugaauu

SEQ ID NO: 45609 - RNA, 20 nt, Homo sapiens
uacagaaaaguugaauuuua

SEQ ID NO: 45610 - RNA, 13 nt, Homo sapiens
uacagccaggcgg

SEQ ID NO: 45611 - RNA, 20 nt, Homo sapiens
uacaguggggaaugaagaua

SEQ ID NO: 45612 - RNA, 20 nt, Homo sapiens
uacaguuacucagaauucuc

SEQ ID NO: 45613 - RNA, 18 nt, Homo sapiens
uacaguuagagauuuuua

SEQ ID NO: 45614 - RNA, 15 nt, Homo sapiens
uacauaaaguaugug

SEQ ID NO: 45615 - RNA, 19 nt, Homo sapiens
uacauaaaguaugugcaua

SEQ ID NO: 45616 - RNA, 20 nt, Homo sapiens
uacauaaaguaugugcauau

SEQ ID NO: 45617 - RNA, 21 nt, Homo sapiens
uacauaaugcgugcauaccac

SEQ ID NO: 45618 - RNA, 21 nt, Homo sapiens
uacauauuucuuugccuuuau

SEQ ID NO: 45619 - RNA, 21 nt, Homo sapiens
uacaucccuuaccugggaaag

SEQ ID NO: 45620 - RNA, 15 nt, Homo sapiens
uacaucuuucacauu

SEQ ID NO: 45621 - RNA, 18 nt, Homo sapiens
uacauguauuuguuugca

SEQ ID NO: 45622 - RNA, 18 nt, Homo sapiens
uacauuauuggacuucca

SEQ ID NO: 45623 - RNA, 12 nt, Homo sapiens
uacauucugcuu

SEQ ID NO: 45624 - RNA, 16 nt, Homo sapiens
uacauucugcuuucau

SEQ ID NO: 45625 - RNA, 13 nt, Homo sapiens
uacauuuccaaau

SEQ ID NO: 45626 - RNA, 15 nt, Homo sapiens
uacauuuguauaaaa

SEQ ID NO: 45627 - RNA, 20 nt, Homo sapiens
uacauuuguauaaaauaauu

SEQ ID NO: 45628 - RNA, 20 nt, Homo sapiens
uacauuuuuuuuuucaauaa

SEQ ID NO: 45629 - RNA, 21 nt, Homo sapiens
uacauuuuuuuuuucaauaaa

SEQ ID NO: 45630 - RNA, 22 nt, Homo sapiens
uaccagccuuggauacuccaug

SEQ ID NO: 45631 - RNA, 22 nt, Homo sapiens
uaccagggacugaggggagggg

SEQ ID NO: 45632 - RNA, 23 nt, Homo sapiens
uaccaugaugcugagcccggaaa

SEQ ID NO: 45633 - RNA, 17 nt, Homo sapiens
uaccucugauaccucaa

SEQ ID NO: 45634 - RNA, 14 nt, Homo sapiens
uaccugcacacugu

SEQ ID NO: 45635 - RNA, 16 nt, Homo sapiens
uaccuguucgcgcgcc

SEQ ID NO: 45636 - RNA, 22 nt, Homo sapiens
uaccuguucgcgcgccuccgcu

SEQ ID NO: 45637 - RNA, 11 nt, Homo sapiens
uaccuucucac

SEQ ID NO: 45638 - RNA, 13 nt, Homo sapiens
uacgcgagcgcgc

SEQ ID NO: 45639 - RNA, 14 nt, Homo sapiens
uacgcgagcgcgcg

SEQ ID NO: 45640 - RNA, 15 nt, Homo sapiens
uacgcgagcgcgcgc

SEQ ID NO: 45641 - RNA, 17 nt, Homo sapiens
uacgcgagcgcgcgcgc

SEQ ID NO: 45642 - RNA, 20 nt, Homo sapiens
uacgcgagcgcgcgcgcccu

SEQ ID NO: 45643 - RNA, 13 nt, Homo sapiens
uacgcgcgcuccg

SEQ ID NO: 45644 - RNA, 14 nt, Homo sapiens
uacgcgcgcuccgc

SEQ ID NO: 45645 - RNA, 22 nt, Homo sapiens
uacgugggcauucaaauguauu

SEQ ID NO: 45646 - RNA, 12 nt, Homo sapiens
uacguugugcau

SEQ ID NO: 45647 - RNA, 13 nt, Homo sapiens
uacguugugcauu

SEQ ID NO: 45648 - RNA, 16 nt, Homo sapiens
uacguugugcauuugg

SEQ ID NO: 45649 - RNA, 11 nt, Homo sapiens
uacuaaguuuu

SEQ ID NO: 45650 - RNA, 14 nt, Homo sapiens
uacuauauauguga

SEQ ID NO: 45651 - RNA, 22 nt, Homo sapiens
uacuauuuaagagaacaagcaa

SEQ ID NO: 45652 - RNA, 13 nt, Homo sapiens
uacuauuuaauua

SEQ ID NO: 45653 - RNA, 15 nt, Homo sapiens
uacucauacauguua

SEQ ID NO: 45654 - RNA, 17 nt, Homo sapiens
uacucauuaggauggcu

SEQ ID NO: 45655 - RNA, 18 nt, Homo sapiens
uacuccagccugggugac

SEQ ID NO: 45656 - RNA, 19 nt, Homo sapiens
uacuccagccugggugaca

SEQ ID NO: 45657 - RNA, 22 nt, Homo sapiens
uacucugaagggcaucaugcau

SEQ ID NO: 45658 - RNA, 11 nt, Homo sapiens
uacucuuauau

SEQ ID NO: 45659 - RNA, 12 nt, Homo sapiens
uacuguaagaaa

SEQ ID NO: 45660 - RNA, 19 nt, Homo sapiens
uacuuauuguagcauccug

SEQ ID NO: 45661 - RNA, 13 nt, Homo sapiens
uacuucaauacuu

SEQ ID NO: 45662 - RNA, 12 nt, Homo sapiens
uacuuccagggc

SEQ ID NO: 45663 - RNA, 13 nt, Homo sapiens
uacuuccagggcu

SEQ ID NO: 45664 - RNA, 20 nt, Homo sapiens
uacuucccgcuguuccucgc

SEQ ID NO: 45665 - RNA, 16 nt, Homo sapiens
uacuucuucucauacu

SEQ ID NO: 45666 - RNA, 20 nt, Homo sapiens
uagaaaacaggcaaauuccu

SEQ ID NO: 45667 - RNA, 16 nt, Homo sapiens
uagaaaagggaacuga

SEQ ID NO: 45668 - RNA, 14 nt, Homo sapiens
uagaagauggcacu

SEQ ID NO: 45669 - RNA, 16 nt, Homo sapiens
uagaagucacauuccu

SEQ ID NO: 45670 - RNA, 20 nt, Homo sapiens
uagaauaauacuagucuuau

SEQ ID NO: 45671 - RNA, 22 nt, Homo sapiens
uagaauacuaauaaaauacaua

SEQ ID NO: 45672 - RNA, 20 nt, Homo sapiens
uagaauauuuauuaccucug

SEQ ID NO: 45673 - RNA, 14 nt, Homo sapiens
uagaauguuuucaa

SEQ ID NO: 45674 - RNA, 13 nt, Homo sapiens
uagaauuuauuca

SEQ ID NO: 45675 - RNA, 13 nt, Homo sapiens
uagacccucaugc

SEQ ID NO: 45676 - RNA, 15 nt, Homo sapiens
uagagaauuuccuua

SEQ ID NO: 45677 - RNA, 17 nt, Homo sapiens
uagagacuuugugaaaa

SEQ ID NO: 45678 - RNA, 16 nt, Homo sapiens
uagaggcugaggaauc

SEQ ID NO: 45679 - RNA, 23 nt, Homo sapiens
uagaguucugucuggacuuucca

SEQ ID NO: 45680 - RNA, 16 nt, Homo sapiens
uagauaaacucagaaa

SEQ ID NO: 45681 - RNA, 14 nt, Homo sapiens
uagauagaugaaga

SEQ ID NO: 45682 - RNA, 15 nt, Homo sapiens
uagauagaugaagaa

SEQ ID NO: 45683 - RNA, 19 nt, Homo sapiens
uagaugaagaagcuagaaa

SEQ ID NO: 45684 - RNA, 12 nt, Homo sapiens
uagaugcaguuc

SEQ ID NO: 45685 - RNA, 18 nt, Homo sapiens
uagauucccugagcagga

SEQ ID NO: 45686 - RNA, 13 nt, Homo sapiens
uagauucuuuauu

SEQ ID NO: 45687 - RNA, 21 nt, Homo sapiens
uagcaaaucuacugucaauuu

SEQ ID NO: 45688 - RNA, 18 nt, Homo sapiens
uagcagauuuaagauaug

SEQ ID NO: 45689 - RNA, 20 nt, Homo sapiens
uagcauaguaccucugcuau

SEQ ID NO: 45690 - RNA, 21 nt, Homo sapiens
uagcauaguaccucugcuauu

SEQ ID NO: 45691 - RNA, 22 nt, Homo sapiens
uagcauaguaccucugcuauuu

SEQ ID NO: 45692 - RNA, 18 nt, Homo sapiens
uagcauccuggaauaucu

SEQ ID NO: 45693 - RNA, 13 nt, Homo sapiens
uagcaucucagga

SEQ ID NO: 45694 - RNA, 15 nt, Homo sapiens
uagccacuucacuuu

SEQ ID NO: 45695 - RNA, 15 nt, Homo sapiens
uagcccuuacguccu

SEQ ID NO: 45696 - RNA, 10 nt, Homo sapiens
uagccgggca

SEQ ID NO: 45697 - RNA, 22 nt, Homo sapiens
uagccgggcaugguggcgcgca

SEQ ID NO: 45698 - RNA, 19 nt, Homo sapiens
uagcgcagccaugugauua

SEQ ID NO: 45699 - RNA, 13 nt, Homo sapiens
uagcuaagauaua

SEQ ID NO: 45700 - RNA, 14 nt, Homo sapiens
uagcucucugaccu

SEQ ID NO: 45701 - RNA, 21 nt, Homo sapiens
uagcucucugaccuccuccuu

SEQ ID NO: 45702 - RNA, 14 nt, Homo sapiens
uagcuuuacuguuu

SEQ ID NO: 45703 - RNA, 14 nt, Homo sapiens
uagcuuucuuccug

SEQ ID NO: 45704 - RNA, 14 nt, Homo sapiens
uagcuuuuuucucu

SEQ ID NO: 45705 - RNA, 16 nt, Homo sapiens
uaggaacgguaaauuu

SEQ ID NO: 45706 - RNA, 14 nt, Homo sapiens
uagguuuggacaaa

SEQ ID NO: 45707 - RNA, 13 nt, Homo sapiens
uaguaauuggaaa

SEQ ID NO: 45708 - RNA, 16 nt, Homo sapiens
uaguaauuggaaaggc

SEQ ID NO: 45709 - RNA, 17 nt, Homo sapiens
uaguaauuggaaaggca

SEQ ID NO: 45710 - RNA, 16 nt, Homo sapiens
uaguaccucugcuauu

SEQ ID NO: 45711 - RNA, 19 nt, Homo sapiens
uaguaugaggcauuuguuu

SEQ ID NO: 45712 - RNA, 15 nt, Homo sapiens
uagucucuaucauua

SEQ ID NO: 45713 - RNA, 16 nt, Homo sapiens
uagucucuaucauuaa

SEQ ID NO: 45714 - RNA, 22 nt, Homo sapiens
uagugaaacucguuaauuugua

SEQ ID NO: 45715 - RNA, 17 nt, Homo sapiens
uagugaaucacguaaag

SEQ ID NO: 45716 - RNA, 22 nt, Homo sapiens
uagugaaucacguaaagcuaga

SEQ ID NO: 45717 - RNA, 14 nt, Homo sapiens
uaguggugugauuu

SEQ ID NO: 45718 - RNA, 14 nt, Homo sapiens
uaguguacaugaaa

SEQ ID NO: 45719 - RNA, 17 nt, Homo sapiens
uagugucugaugaaugu

SEQ ID NO: 45720 - RNA, 19 nt, Homo sapiens
uaguguuggaaaaugugca

SEQ ID NO: 45721 - RNA, 22 nt, Homo sapiens
uaguguuggaaaaugugcaaua

SEQ ID NO: 45722 - RNA, 23 nt, Homo sapiens
uaguguuggaaaaugugcaauau

SEQ ID NO: 45723 - RNA, 17 nt, Homo sapiens
uaguuacuaaacaugua

SEQ ID NO: 45724 - RNA, 22 nt, Homo sapiens
uaguuacuaaacauguauguaa

SEQ ID NO: 45725 - RNA, 11 nt, Homo sapiens
uaguuagcuuu

SEQ ID NO: 45726 - RNA, 19 nt, Homo sapiens
uaguucaauccugauucau

SEQ ID NO: 45727 - RNA, 12 nt, Homo sapiens
uaguucuacucc

SEQ ID NO: 45728 - RNA, 10 nt, Homo sapiens
uaguucuuca

SEQ ID NO: 45729 - RNA, 11 nt, Homo sapiens
uaguucuucaa

SEQ ID NO: 45730 - RNA, 14 nt, Homo sapiens
uaguuguaauuuuu

SEQ ID NO: 45731 - RNA, 19 nt, Homo sapiens
uaguuguaccgcaauguga

SEQ ID NO: 45732 - RNA, 17 nt, Homo sapiens
uaguuuaugauuccacc

SEQ ID NO: 45733 - RNA, 20 nt, Homo sapiens
uaguuucccuugcaugguuu

SEQ ID NO: 45734 - RNA, 16 nt, Homo sapiens
uauaaaagacugacca

SEQ ID NO: 45735 - RNA, 23 nt, Homo sapiens
uauaagugaagugauacuaucca

SEQ ID NO: 45736 - RNA, 12 nt, Homo sapiens
uauaauuuugug

SEQ ID NO: 45737 - RNA, 19 nt, Homo sapiens
uauacuauauuuuucucaa

SEQ ID NO: 45738 - RNA, 16 nt, Homo sapiens
uauagaaaugcugguu

SEQ ID NO: 45739 - RNA, 17 nt, Homo sapiens
uauagaauggaacucaa

SEQ ID NO: 45740 - RNA, 21 nt, Homo sapiens
uauaggugcuacaaaaacaca

SEQ ID NO: 45741 - RNA, 15 nt, Homo sapiens
uauaguaaugugacu

SEQ ID NO: 45742 - RNA, 17 nt, Homo sapiens
uauagucacuaguugua

SEQ ID NO: 45743 - RNA, 16 nt, Homo sapiens
uauaguucuacuccau

SEQ ID NO: 45744 - RNA, 14 nt, Homo sapiens
uauauaagcuugua

SEQ ID NO: 45745 - RNA, 12 nt, Homo sapiens
uauauauauuuu

SEQ ID NO: 45746 - RNA, 13 nt, Homo sapiens
uauaucaguccuc

SEQ ID NO: 45747 - RNA, 12 nt, Homo sapiens
uauauccuguga

SEQ ID NO: 45748 - RNA, 18 nt, Homo sapiens
uauauguguuuuucacau

SEQ ID NO: 45749 - RNA, 13 nt, Homo sapiens
uauauuguuugcu

SEQ ID NO: 45750 - RNA, 14 nt, Homo sapiens
uauauuguuugcua

SEQ ID NO: 45751 - RNA, 12 nt, Homo sapiens
uauauuuccuua

SEQ ID NO: 45752 - RNA, 13 nt, Homo sapiens
uauauuuccuuau

SEQ ID NO: 45753 - RNA, 13 nt, Homo sapiens
uauauuugaaaua

SEQ ID NO: 45754 - RNA, 13 nt, Homo sapiens
uaucacuugucaa

SEQ ID NO: 45755 - RNA, 18 nt, Homo sapiens
uaucacuugucaauaaaa

SEQ ID NO: 45756 - RNA, 19 nt, Homo sapiens
uaucacuugucaauaaaau

SEQ ID NO: 45757 - RNA, 15 nt, Homo sapiens
uaucagcuacaauug

SEQ ID NO: 45758 - RNA, 14 nt, Homo sapiens
uaucaucaguauug

SEQ ID NO: 45759 - RNA, 14 nt, Homo sapiens
uaucccuacuguaa

SEQ ID NO: 45760 - RNA, 22 nt, Homo sapiens
uauccuaauaaaaaggugacca

SEQ ID NO: 45761 - RNA, 15 nt, Homo sapiens
uauccugugacuguc

SEQ ID NO: 45762 - RNA, 14 nt, Homo sapiens
uaucgccaucacag

SEQ ID NO: 45763 - RNA, 20 nt, Homo sapiens
uaucuaauauauaugaauaa

SEQ ID NO: 45764 - RNA, 16 nt, Homo sapiens
uaucuagauacuguau

SEQ ID NO: 45765 - RNA, 22 nt, Homo sapiens
uaucucaggggccaacuaggca

SEQ ID NO: 45766 - RNA, 23 nt, Homo sapiens
uaucucaggggccaacuaggcag

SEQ ID NO: 45767 - RNA, 14 nt, Homo sapiens
uaucucauuuccaa

SEQ ID NO: 45768 - RNA, 11 nt, Homo sapiens
uaucugcuaug

SEQ ID NO: 45769 - RNA, 15 nt, Homo sapiens
uaucuuaguugguau

SEQ ID NO: 45770 - RNA, 14 nt, Homo sapiens
uaucuucacuuuua

SEQ ID NO: 45771 - RNA, 17 nt, Homo sapiens
uaucuuguuuuuccacu

SEQ ID NO: 45772 - RNA, 14 nt, Homo sapiens
uaugaaaaugucau

SEQ ID NO: 45773 - RNA, 12 nt, Homo sapiens
uaugaaauauua

SEQ ID NO: 45774 - RNA, 14 nt, Homo sapiens
uaugacacaucucu

SEQ ID NO: 45775 - RNA, 18 nt, Homo sapiens
uaugacgugacuggccug

SEQ ID NO: 45776 - RNA, 16 nt, Homo sapiens
uaugagaaucagauca

SEQ ID NO: 45777 - RNA, 22 nt, Homo sapiens
uaugagauguagcaaauuccaa

SEQ ID NO: 45778 - RNA, 14 nt, Homo sapiens
uaugaggcauuugu

SEQ ID NO: 45779 - RNA, 20 nt, Homo sapiens
uaugcaugaaguaauaugca

SEQ ID NO: 45780 - RNA, 22 nt, Homo sapiens
uaugcaugaaguaauaugcaca

SEQ ID NO: 45781 - RNA, 13 nt, Homo sapiens
uaugccccauuca

SEQ ID NO: 45782 - RNA, 14 nt, Homo sapiens
uaugccccauucaa

SEQ ID NO: 45783 - RNA, 17 nt, Homo sapiens
uaugccccauucaacau

SEQ ID NO: 45784 - RNA, 14 nt, Homo sapiens
uaugcuauuuauua

SEQ ID NO: 45785 - RNA, 15 nt, Homo sapiens
uaugcuucuguuuua

SEQ ID NO: 45786 - RNA, 21 nt, Homo sapiens
uauggcuauaggugcuacaaa

SEQ ID NO: 45787 - RNA, 18 nt, Homo sapiens
uauggcuuuugugcauua

SEQ ID NO: 45788 - RNA, 21 nt, Homo sapiens
uauguaaauagaaacguguau

SEQ ID NO: 45789 - RNA, 14 nt, Homo sapiens
uauguaaauagcua

SEQ ID NO: 45790 - RNA, 21 nt, Homo sapiens
uauguagaauauauuuccuua

SEQ ID NO: 45791 - RNA, 14 nt, Homo sapiens
uaugugcauauuuu

SEQ ID NO: 45792 - RNA, 18 nt, Homo sapiens
uaugugcauuuaauuaga

SEQ ID NO: 45793 - RNA, 14 nt, Homo sapiens
uauguggcuguauc

SEQ ID NO: 45794 - RNA, 16 nt, Homo sapiens
uauguuaaaacuggga

SEQ ID NO: 45795 - RNA, 22 nt, Homo sapiens
uauguuaauauuuuauguguaa

SEQ ID NO: 45796 - RNA, 18 nt, Homo sapiens
uauguuagagaauuuccu

SEQ ID NO: 45797 - RNA, 19 nt, Homo sapiens
uauguuagagaauuuccuu

SEQ ID NO: 45798 - RNA, 20 nt, Homo sapiens
uauguuagagaauuuccuua

SEQ ID NO: 45799 - RNA, 19 nt, Homo sapiens
uauguucuaagaagugaaa

SEQ ID NO: 45800 - RNA, 22 nt, Homo sapiens
uauuaaagaucugcaacuacua

SEQ ID NO: 45801 - RNA, 17 nt, Homo sapiens
uauuaaguauuuuauua

SEQ ID NO: 45802 - RNA, 11 nt, Homo sapiens
uauuacaucuu

SEQ ID NO: 45803 - RNA, 16 nt, Homo sapiens
uauuacaucuuucaca

SEQ ID NO: 45804 - RNA, 14 nt, Homo sapiens
uauuacgugcaaua

SEQ ID NO: 45805 - RNA, 19 nt, Homo sapiens
uauuagugaaguaugcacu

SEQ ID NO: 45806 - RNA, 20 nt, Homo sapiens
uauuagugaaguaugcacua

SEQ ID NO: 45807 - RNA, 21 nt, Homo sapiens
uauucacaaccacucauucaa

SEQ ID NO: 45808 - RNA, 19 nt, Homo sapiens
uauucagccccgggagugg

SEQ ID NO: 45809 - RNA, 23 nt, Homo sapiens
uauucagccccgggaguggcgcg

SEQ ID NO: 45810 - RNA, 16 nt, Homo sapiens
uauucucuccuguacc

SEQ ID NO: 45811 - RNA, 23 nt, Homo sapiens
uauugauaauaaaauucauucca

SEQ ID NO: 45812 - RNA, 21 nt, Homo sapiens
uauugauuuccguuaaaauac

SEQ ID NO: 45813 - RNA, 19 nt, Homo sapiens
uauugucuagugaaacucg

SEQ ID NO: 45814 - RNA, 20 nt, Homo sapiens
uauuguuuaaaaucauuucu

SEQ ID NO: 45815 - RNA, 19 nt, Homo sapiens
uauuuaauagguuuggaca

SEQ ID NO: 45816 - RNA, 17 nt, Homo sapiens
uauuuacggaacucaaa

SEQ ID NO: 45817 - RNA, 21 nt, Homo sapiens
uauuuauaauuccuauauccu

SEQ ID NO: 45818 - RNA, 19 nt, Homo sapiens
uauuuauugagcaccugca

SEQ ID NO: 45819 - RNA, 20 nt, Homo sapiens
uauuuauugauguuuucaca

SEQ ID NO: 45820 - RNA, 15 nt, Homo sapiens
uauuuauugcugaau

SEQ ID NO: 45821 - RNA, 15 nt, Homo sapiens
uauuuauuuauucau

SEQ ID NO: 45822 - RNA, 13 nt, Homo sapiens
uauuuauuuauuu

SEQ ID NO: 45823 - RNA, 16 nt, Homo sapiens
uauuuauuuuaauaau

SEQ ID NO: 45824 - RNA, 15 nt, Homo sapiens
uauuucacuugauga

SEQ ID NO: 45825 - RNA, 23 nt, Homo sapiens
uauuuccaagaaauauuccuuaa

SEQ ID NO: 45826 - RNA, 17 nt, Homo sapiens
uauuugcaagacauaga

SEQ ID NO: 45827 - RNA, 14 nt, Homo sapiens
uauuuguaucacaa

SEQ ID NO: 45828 - RNA, 16 nt, Homo sapiens
uauuuuagguguaaaa

SEQ ID NO: 45829 - RNA, 17 nt, Homo sapiens
uauuuuauaucaauuua

SEQ ID NO: 45830 - RNA, 16 nt, Homo sapiens
uauuuuaucugcuaug

SEQ ID NO: 45831 - RNA, 17 nt, Homo sapiens
uauuuucaugcuguuca

SEQ ID NO: 45832 - RNA, 12 nt, Homo sapiens
uauuuugaacaa

SEQ ID NO: 45833 - RNA, 12 nt, Homo sapiens
uauuuuguuuca

SEQ ID NO: 45834 - RNA, 14 nt, Homo sapiens
uauuuuuaaacugu

SEQ ID NO: 45835 - RNA, 22 nt, Homo sapiens
uauuuuuuaugaaacauuacag

SEQ ID NO: 45836 - RNA, 13 nt, Homo sapiens
uauuuuuuucuuu

SEQ ID NO: 45837 - RNA, 18 nt, Homo sapiens
uauuuuuuucuuuucuuu

SEQ ID NO: 45838 - RNA, 15 nt, Homo sapiens
uauuuuuuuuuuuaa

SEQ ID NO: 45839 - RNA, 20 nt, Homo sapiens
ucaaaacuucagacauagaa

SEQ ID NO: 45840 - RNA, 15 nt, Homo sapiens
ucaaagauagggagg

SEQ ID NO: 45841 - RNA, 15 nt, Homo sapiens
ucaaauccuugaaga

SEQ ID NO: 45842 - RNA, 12 nt, Homo sapiens
ucaaauguucuc

SEQ ID NO: 45843 - RNA, 16 nt, Homo sapiens
ucaaauguuguucucu

SEQ ID NO: 45844 - RNA, 23 nt, Homo sapiens
ucaacaagagacuggaaggacca

SEQ ID NO: 45845 - RNA, 14 nt, Homo sapiens
ucaaccaccuuuca

SEQ ID NO: 45846 - RNA, 15 nt, Homo sapiens
ucaacucauauuuuc

SEQ ID NO: 45847 - RNA, 16 nt, Homo sapiens
ucaacucauauuuuca

SEQ ID NO: 45848 - RNA, 10 nt, Homo sapiens
ucaagccagc

SEQ ID NO: 45849 - RNA, 11 nt, Homo sapiens
ucaagccagcc

SEQ ID NO: 45850 - RNA, 12 nt, Homo sapiens
ucaagccugccu

SEQ ID NO: 45851 - RNA, 19 nt, Homo sapiens
ucaaggcuuagacccucau

SEQ ID NO: 45852 - RNA, 23 nt, Homo sapiens
ucaaggcuuagacccucaugcug

SEQ ID NO: 45853 - RNA, 15 nt, Homo sapiens
ucaaguucaccagac

SEQ ID NO: 45854 - RNA, 21 nt, Homo sapiens
ucaauaaaacuuuuccaauga

SEQ ID NO: 45855 - RNA, 24 nt, Homo sapiens
ucaauauuuauuauuuucaccugu

SEQ ID NO: 45856 - RNA, 17 nt, Homo sapiens
ucaaucuggauucauau

SEQ ID NO: 45857 - RNA, 17 nt, Homo sapiens
ucaaugaaugaaugaau

SEQ ID NO: 45858 - RNA, 12 nt, Homo sapiens
ucaaugcagccc

SEQ ID NO: 45859 - RNA, 13 nt, Homo sapiens
ucaaugcagcccc

SEQ ID NO: 45860 - RNA, 15 nt, Homo sapiens
ucaaugccccugaau

SEQ ID NO: 45861 - RNA, 16 nt, Homo sapiens
ucaaugccccugaauu

SEQ ID NO: 45862 - RNA, 17 nt, Homo sapiens
ucaauguuuagcagauu

SEQ ID NO: 45863 - RNA, 20 nt, Homo sapiens
ucaauguuuagcagauuuaa

SEQ ID NO: 45864 - RNA, 15 nt, Homo sapiens
ucaauuccucuggga

SEQ ID NO: 45865 - RNA, 21 nt, Homo sapiens
ucaauuuaaaaaaaaaccuga

SEQ ID NO: 45866 - RNA, 17 nt, Homo sapiens
ucaauuuggcagugaua

SEQ ID NO: 45867 - RNA, 16 nt, Homo sapiens
ucacaaacucauccau

SEQ ID NO: 45868 - RNA, 16 nt, Homo sapiens
ucacaagacccaaaag

SEQ ID NO: 45869 - RNA, 13 nt, Homo sapiens
ucacaagcacuuu

SEQ ID NO: 45870 - RNA, 21 nt, Homo sapiens
ucacaagugaaaaacauccag

SEQ ID NO: 45871 - RNA, 14 nt, Homo sapiens
ucacagauaccucu

SEQ ID NO: 45872 - RNA, 21 nt, Homo sapiens
ucacagcuacuugggaggcug

SEQ ID NO: 45873 - RNA, 23 nt, Homo sapiens
ucacaggaaguagaggaggccac

SEQ ID NO: 45874 - RNA, 17 nt, Homo sapiens
ucacaggggacaggaug

SEQ ID NO: 45875 - RNA, 21 nt, Homo sapiens
ucacauacaauuauuuuuaca

SEQ ID NO: 45876 - RNA, 14 nt, Homo sapiens
ucacauccuguguu

SEQ ID NO: 45877 - RNA, 17 nt, Homo sapiens
ucacauuccaagccuca

SEQ ID NO: 45878 - RNA, 13 nt, Homo sapiens
ucaccaaggcuga

SEQ ID NO: 45879 - RNA, 22 nt, Homo sapiens
ucaccaucaauuuuaguuguca

SEQ ID NO: 45880 - RNA, 20 nt, Homo sapiens
ucaccucauggaauuggagc

SEQ ID NO: 45881 - RNA, 22 nt, Homo sapiens
ucaccucauggaauuggagcuc

SEQ ID NO: 45882 - RNA, 15 nt, Homo sapiens
ucaccucucaccucc

SEQ ID NO: 45883 - RNA, 8 nt, Homo sapiens
ucaccugu

SEQ ID NO: 45884 - RNA, 9 nt, Homo sapiens
ucaccuguu

SEQ ID NO: 45885 - RNA, 16 nt, Homo sapiens
ucacguaaagcuagaa

SEQ ID NO: 45886 - RNA, 16 nt, Homo sapiens
ucacuaguuguaauuu

SEQ ID NO: 45887 - RNA, 17 nt, Homo sapiens
ucacuaguuguaauuuu

SEQ ID NO: 45888 - RNA, 14 nt, Homo sapiens
ucacuccacuugga

SEQ ID NO: 45889 - RNA, 16 nt, Homo sapiens
ucacugcuuaacuuca

SEQ ID NO: 45890 - RNA, 19 nt, Homo sapiens
ucacugguggcuguuccug

SEQ ID NO: 45891 - RNA, 15 nt, Homo sapiens
ucacuuaauccuuug

SEQ ID NO: 45892 - RNA, 12 nt, Homo sapiens
ucacuugaugau

SEQ ID NO: 45893 - RNA, 19 nt, Homo sapiens
ucacuugucaauaaaaucc

SEQ ID NO: 45894 - RNA, 13 nt, Homo sapiens
ucacuuuacuguc

SEQ ID NO: 45895 - RNA, 22 nt, Homo sapiens
ucacuuuacuguccccaucauc

SEQ ID NO: 45896 - RNA, 18 nt, Homo sapiens
ucacuuuuuuucuuuucu

SEQ ID NO: 45897 - RNA, 13 nt, Homo sapiens
ucagaagaaauuc

SEQ ID NO: 45898 - RNA, 15 nt, Homo sapiens
ucagaagaccugguc

SEQ ID NO: 45899 - RNA, 18 nt, Homo sapiens
ucagaaggcaaaugacuu

SEQ ID NO: 45900 - RNA, 15 nt, Homo sapiens
ucagacagaacuuga

SEQ ID NO: 45901 - RNA, 17 nt, Homo sapiens
ucagacauagaauuaac

SEQ ID NO: 45902 - RNA, 20 nt, Homo sapiens
ucagaccuagaauaauacua

SEQ ID NO: 45903 - RNA, 17 nt, Homo sapiens
ucagaucauuucaaaac

SEQ ID NO: 45904 - RNA, 15 nt, Homo sapiens
ucagaucucuaacuu

SEQ ID NO: 45905 - RNA, 17 nt, Homo sapiens
ucagaucucuaacuuca

SEQ ID NO: 45906 - RNA, 16 nt, Homo sapiens
ucagcaccuacagugu

SEQ ID NO: 45907 - RNA, 14 nt, Homo sapiens
ucagccacugugau

SEQ ID NO: 45908 - RNA, 22 nt, Homo sapiens
ucagccagcccucuucugacac

SEQ ID NO: 45909 - RNA, 18 nt, Homo sapiens
ucagccccgggaguggcg

SEQ ID NO: 45910 - RNA, 14 nt, Homo sapiens
ucagcgguuuauau

SEQ ID NO: 45911 - RNA, 23 nt, Homo sapiens
ucagcucucaguugcagcccugc

SEQ ID NO: 45912 - RNA, 17 nt, Homo sapiens
ucagcugccuccccagc

SEQ ID NO: 45913 - RNA, 20 nt, Homo sapiens
ucagcugccuccccagcucu

SEQ ID NO: 45914 - RNA, 21 nt, Homo sapiens
ucagcugccuccccagcucua

SEQ ID NO: 45915 - RNA, 20 nt, Homo sapiens
ucaggaaaucaaauaugcaa

SEQ ID NO: 45916 - RNA, 22 nt, Homo sapiens
ucaggagauuucaugccuggug

SEQ ID NO: 45917 - RNA, 12 nt, Homo sapiens
ucaggaugccca

SEQ ID NO: 45918 - RNA, 21 nt, Homo sapiens
ucaggcuggccaacgggguga

SEQ ID NO: 45919 - RNA, 19 nt, Homo sapiens
ucaggugacccugaugaaa

SEQ ID NO: 45920 - RNA, 15 nt, Homo sapiens
ucaggugugcccuga

SEQ ID NO: 45921 - RNA, 17 nt, Homo sapiens
ucaguccaaagggcaug

SEQ ID NO: 45922 - RNA, 16 nt, Homo sapiens
ucaguccaugaagaug

SEQ ID NO: 45923 - RNA, 17 nt, Homo sapiens
ucaguccucuuucaaag

SEQ ID NO: 45924 - RNA, 18 nt, Homo sapiens
ucaguccucuuucaaagg

SEQ ID NO: 45925 - RNA, 18 nt, Homo sapiens
ucagugucaaugcagccc

SEQ ID NO: 45926 - RNA, 15 nt, Homo sapiens
ucaguguccucaucu

SEQ ID NO: 45927 - RNA, 13 nt, Homo sapiens
ucaguuacucuga

SEQ ID NO: 45928 - RNA, 14 nt, Homo sapiens
ucauacauguuaca

SEQ ID NO: 45929 - RNA, 16 nt, Homo sapiens
ucauaccuaucaucuu

SEQ ID NO: 45930 - RNA, 10 nt, Homo sapiens
ucauauugau

SEQ ID NO: 45931 - RNA, 20 nt, Homo sapiens
ucauauugaugugugucuag

SEQ ID NO: 45932 - RNA, 15 nt, Homo sapiens
ucaucaaucaaauaa

SEQ ID NO: 45933 - RNA, 12 nt, Homo sapiens
ucaucaaugaau

SEQ ID NO: 45934 - RNA, 20 nt, Homo sapiens
ucaucaaugaaugaaugaau

SEQ ID NO: 45935 - RNA, 22 nt, Homo sapiens
ucaucaguauugaagcauuuua

SEQ ID NO: 45936 - RNA, 19 nt, Homo sapiens
ucaucauaauaaauaucua

SEQ ID NO: 45937 - RNA, 13 nt, Homo sapiens
ucauccacuuucc

SEQ ID NO: 45938 - RNA, 14 nt, Homo sapiens
ucaucccacccgcc

SEQ ID NO: 45939 - RNA, 15 nt, Homo sapiens
ucaucccacccgccc

SEQ ID NO: 45940 - RNA, 18 nt, Homo sapiens
ucaucccacccgcccacc

SEQ ID NO: 45941 - RNA, 18 nt, Homo sapiens
ucaugaaggggcggcggc

SEQ ID NO: 45942 - RNA, 16 nt, Homo sapiens
ucaugaauuaguuuua

SEQ ID NO: 45943 - RNA, 13 nt, Homo sapiens
ucaugcauuugca

SEQ ID NO: 45944 - RNA, 13 nt, Homo sapiens
ucauggaauugga

SEQ ID NO: 45945 - RNA, 15 nt, Homo sapiens
ucauguacauccaug

SEQ ID NO: 45946 - RNA, 17 nt, Homo sapiens
ucauguacauccauggu

SEQ ID NO: 45947 - RNA, 13 nt, Homo sapiens
ucauguugaaacu

SEQ ID NO: 45948 - RNA, 23 nt, Homo sapiens
ucauguuuuugcuuuucaacaca

SEQ ID NO: 45949 - RNA, 17 nt, Homo sapiens
ucauuaaaguucuagug

SEQ ID NO: 45950 - RNA, 13 nt, Homo sapiens
ucauuaguuuuga

SEQ ID NO: 45951 - RNA, 14 nt, Homo sapiens
ucauuaguuuugaa

SEQ ID NO: 45952 - RNA, 17 nt, Homo sapiens
ucauuaucaguccaaag

SEQ ID NO: 45953 - RNA, 11 nt, Homo sapiens
ucauuaucuca

SEQ ID NO: 45954 - RNA, 17 nt, Homo sapiens
ucauuauguuaauauuu

SEQ ID NO: 45955 - RNA, 18 nt, Homo sapiens
ucauucuugaaagcugug

SEQ ID NO: 45956 - RNA, 14 nt, Homo sapiens
ucauucuuuuugaa

SEQ ID NO: 45957 - RNA, 16 nt, Homo sapiens
ucauucuuuuugaaau

SEQ ID NO: 45958 - RNA, 18 nt, Homo sapiens
ucauucuuuuugaaaugu

SEQ ID NO: 45959 - RNA, 12 nt, Homo sapiens
ucauuguucuau

SEQ ID NO: 45960 - RNA, 17 nt, Homo sapiens
ucauuguucuugugaac

SEQ ID NO: 45961 - RNA, 22 nt, Homo sapiens
ucauuuacuuuuaaacuuugau

SEQ ID NO: 45962 - RNA, 11 nt, Homo sapiens
ucauuucaaaa

SEQ ID NO: 45963 - RNA, 13 nt, Homo sapiens
ucauuuguuaaua

SEQ ID NO: 45964 - RNA, 19 nt, Homo sapiens
uccaaaggcuccugagaca

SEQ ID NO: 45965 - RNA, 21 nt, Homo sapiens
uccaaagggcauggguuuuau

SEQ ID NO: 45966 - RNA, 17 nt, Homo sapiens
uccaaaguacacuguuu

SEQ ID NO: 45967 - RNA, 19 nt, Homo sapiens
uccaaaguacacuguuuca

SEQ ID NO: 45968 - RNA, 17 nt, Homo sapiens
uccaaauauuguugaca

SEQ ID NO: 45969 - RNA, 13 nt, Homo sapiens
uccaaauucacaa

SEQ ID NO: 45970 - RNA, 21 nt, Homo sapiens
uccaagaucuuuuuccagguu

SEQ ID NO: 45971 - RNA, 18 nt, Homo sapiens
uccaagccucauguccac

SEQ ID NO: 45972 - RNA, 14 nt, Homo sapiens
uccaagccugacca

SEQ ID NO: 45973 - RNA, 23 nt, Homo sapiens
uccaagccugaccacgcuuucua

SEQ ID NO: 45974 - RNA, 18 nt, Homo sapiens
uccaauaaagaguuccuu

SEQ ID NO: 45975 - RNA, 14 nt, Homo sapiens
uccaauuaaggauu

SEQ ID NO: 45976 - RNA, 15 nt, Homo sapiens
uccaauuaaggauuu

SEQ ID NO: 45977 - RNA, 15 nt, Homo sapiens
uccaccuuacuucuu

SEQ ID NO: 45978 - RNA, 18 nt, Homo sapiens
uccaccuuacuucuucuc

SEQ ID NO: 45979 - RNA, 12 nt, Homo sapiens
uccacuacugcu

SEQ ID NO: 45980 - RNA, 14 nt, Homo sapiens
uccacuacugcuac

SEQ ID NO: 45981 - RNA, 22 nt, Homo sapiens
uccagaaauaaugaaauaacua

SEQ ID NO: 45982 - RNA, 14 nt, Homo sapiens
uccagccugagcga

SEQ ID NO: 45983 - RNA, 20 nt, Homo sapiens
uccagccugagcgacaguga

SEQ ID NO: 45984 - RNA, 12 nt, Homo sapiens
uccagccugggu

SEQ ID NO: 45985 - RNA, 11 nt, Homo sapiens
uccagcugccc

SEQ ID NO: 45986 - RNA, 13 nt, Homo sapiens
uccagcugccccg

SEQ ID NO: 45987 - RNA, 22 nt, Homo sapiens
uccagcugccccggggaggggc

SEQ ID NO: 45988 - RNA, 22 nt, Homo sapiens
uccagggcuacgcgcgcuccgc

SEQ ID NO: 45989 - RNA, 17 nt, Homo sapiens
uccagguuccugagccc

SEQ ID NO: 45990 - RNA, 17 nt, Homo sapiens
uccaguaguuagcuuuc

SEQ ID NO: 45991 - RNA, 21 nt, Homo sapiens
uccauuaaauauaaagcaaga

SEQ ID NO: 45992 - RNA, 16 nt, Homo sapiens
uccauucuuccuccca

SEQ ID NO: 45993 - RNA, 17 nt, Homo sapiens
ucccaaaacugauaccc

SEQ ID NO: 45994 - RNA, 13 nt, Homo sapiens
ucccaaagugcug

SEQ ID NO: 45995 - RNA, 16 nt, Homo sapiens
ucccaaagugcuggga

SEQ ID NO: 45996 - RNA, 21 nt, Homo sapiens
ucccaaagugcugggaauuac

SEQ ID NO: 45997 - RNA, 17 nt, Homo sapiens
ucccaaauuucauaccu

SEQ ID NO: 45998 - RNA, 14 nt, Homo sapiens
ucccaacuauaaaa

SEQ ID NO: 45999 - RNA, 21 nt, Homo sapiens
ucccacacuguccauucuucc

SEQ ID NO: 46000 - RNA, 19 nt, Homo sapiens
ucccagcacuuugggaggc

SEQ ID NO: 46001 - RNA, 19 nt, Homo sapiens
ucccagcgagggacaccga

SEQ ID NO: 46002 - RNA, 15 nt, Homo sapiens
ucccagcuacuuggg

SEQ ID NO: 46003 - RNA, 20 nt, Homo sapiens
ucccagcuacuugggaggcu

SEQ ID NO: 46004 - RNA, 15 nt, Homo sapiens
ucccauucaggaugc

SEQ ID NO: 46005 - RNA, 17 nt, Homo sapiens
ucccauucaggaugccc

SEQ ID NO: 46006 - RNA, 22 nt, Homo sapiens
ucccauucaggaugcccacggc

SEQ ID NO: 46007 - RNA, 23 nt, Homo sapiens
ucccauucaggaugcccacggcu

SEQ ID NO: 46008 - RNA, 17 nt, Homo sapiens
uccccaaaaagaauggg

SEQ ID NO: 46009 - RNA, 18 nt, Homo sapiens
uccccaaaaagaauggga

SEQ ID NO: 46010 - RNA, 16 nt, Homo sapiens
uccccaaccacuucau

SEQ ID NO: 46011 - RNA, 23 nt, Homo sapiens
uccccugucacgugugggcaaug

SEQ ID NO: 46012 - RNA, 16 nt, Homo sapiens
uccccuucccacacug

SEQ ID NO: 46013 - RNA, 16 nt, Homo sapiens
ucccgcuguuccucgc

SEQ ID NO: 46014 - RNA, 20 nt, Homo sapiens
ucccgcuguuccucgccacg

SEQ ID NO: 46015 - RNA, 11 nt, Homo sapiens
ucccggccgcg

SEQ ID NO: 46016 - RNA, 13 nt, Homo sapiens
ucccggccgcgcu

SEQ ID NO: 46017 - RNA, 18 nt, Homo sapiens
ucccggccgcgcugcgcg

SEQ ID NO: 46018 - RNA, 19 nt, Homo sapiens
ucccggccgcgcugcgcgc

SEQ ID NO: 46019 - RNA, 21 nt, Homo sapiens
ucccggccgcgcugcgcgccg

SEQ ID NO: 46020 - RNA, 22 nt, Homo sapiens
ucccggccgcgcugcgcgccgc

SEQ ID NO: 46021 - RNA, 13 nt, Homo sapiens
ucccggccggcgc

SEQ ID NO: 46022 - RNA, 14 nt, Homo sapiens
ucccggccggcgcg

SEQ ID NO: 46023 - RNA, 17 nt, Homo sapiens
ucccggccggcgcgcuc

SEQ ID NO: 46024 - RNA, 13 nt, Homo sapiens
ucccucuuggugc

SEQ ID NO: 46025 - RNA, 14 nt, Homo sapiens
ucccucuuggugcc

SEQ ID NO: 46026 - RNA, 12 nt, Homo sapiens
ucccugagcagg

SEQ ID NO: 46027 - RNA, 13 nt, Homo sapiens
ucccugccuggau

SEQ ID NO: 46028 - RNA, 16 nt, Homo sapiens
ucccugcugcccuucc

SEQ ID NO: 46029 - RNA, 14 nt, Homo sapiens
ucccuggccuuuca

SEQ ID NO: 46030 - RNA, 13 nt, Homo sapiens
ucccuuggacauu

SEQ ID NO: 46031 - RNA, 12 nt, Homo sapiens
ucccuuuuacau

SEQ ID NO: 46032 - RNA, 20 nt, Homo sapiens
ucccuuuuacauacugcugu

SEQ ID NO: 46033 - RNA, 21 nt, Homo sapiens
uccgcauccuccuccugcuuc

SEQ ID NO: 46034 - RNA, 21 nt, Homo sapiens
uccgcgcagcucaggcuggca

SEQ ID NO: 46035 - RNA, 13 nt, Homo sapiens
uccgcuacuucca

SEQ ID NO: 46036 - RNA, 19 nt, Homo sapiens
uccgcuacuuccagggcua

SEQ ID NO: 46037 - RNA, 13 nt, Homo sapiens
uccggacgcugcu

SEQ ID NO: 46038 - RNA, 14 nt, Homo sapiens
uccggacgcugcug

SEQ ID NO: 46039 - RNA, 17 nt, Homo sapiens
uccggacgcugcugccg

SEQ ID NO: 46040 - RNA, 13 nt, Homo sapiens
uccgggucgcagg

SEQ ID NO: 46041 - RNA, 21 nt, Homo sapiens
uccgggucgcaggaccauccc

SEQ ID NO: 46042 - RNA, 15 nt, Homo sapiens
uccgucaacucauau

SEQ ID NO: 46043 - RNA, 18 nt, Homo sapiens
uccguuaaaauaccagcc

SEQ ID NO: 46044 - RNA, 12 nt, Homo sapiens
uccuaacaggaa

SEQ ID NO: 46045 - RNA, 16 nt, Homo sapiens
uccuaagucccugcug

SEQ ID NO: 46046 - RNA, 21 nt, Homo sapiens
uccuaauaaaaaggugaccau

SEQ ID NO: 46047 - RNA, 12 nt, Homo sapiens
uccuagcgcagc

SEQ ID NO: 46048 - RNA, 13 nt, Homo sapiens
uccuagcgcagcc

SEQ ID NO: 46049 - RNA, 14 nt, Homo sapiens
uccuagcgcagcca

SEQ ID NO: 46050 - RNA, 20 nt, Homo sapiens
uccuagcgcagccaugugau

SEQ ID NO: 46051 - RNA, 22 nt, Homo sapiens
uccuagcgcagccaugugauua

SEQ ID NO: 46052 - RNA, 18 nt, Homo sapiens
uccuaggugagcagguga

SEQ ID NO: 46053 - RNA, 13 nt, Homo sapiens
uccuagucucuau

SEQ ID NO: 46054 - RNA, 19 nt, Homo sapiens
uccuagucucuaucauuaa

SEQ ID NO: 46055 - RNA, 23 nt, Homo sapiens
uccuagugaaagaggcagcuuga

SEQ ID NO: 46056 - RNA, 14 nt, Homo sapiens
uccuauauccugug

SEQ ID NO: 46057 - RNA, 16 nt, Homo sapiens
uccuauuauauucauu

SEQ ID NO: 46058 - RNA, 17 nt, Homo sapiens
uccuauuauauucauuc

SEQ ID NO: 46059 - RNA, 13 nt, Homo sapiens
uccucacuuugaa

SEQ ID NO: 46060 - RNA, 16 nt, Homo sapiens
uccucaucuguaaaau

SEQ ID NO: 46061 - RNA, 17 nt, Homo sapiens
uccucaucuguaaaaug

SEQ ID NO: 46062 - RNA, 18 nt, Homo sapiens
uccuccaugaauaucagu

SEQ ID NO: 46063 - RNA, 11 nt, Homo sapiens
uccucccggcc

SEQ ID NO: 46064 - RNA, 15 nt, Homo sapiens
uccucccggccgcgc

SEQ ID NO: 46065 - RNA, 17 nt, Homo sapiens
uccucccggccgcgcug

SEQ ID NO: 46066 - RNA, 20 nt, Homo sapiens
uccucccggccgcgcugcgc

SEQ ID NO: 46067 - RNA, 22 nt, Homo sapiens
uccuccgcugggccuggauggc

SEQ ID NO: 46068 - RNA, 20 nt, Homo sapiens
uccucgaggcccuagcauuu

SEQ ID NO: 46069 - RNA, 13 nt, Homo sapiens
uccucggacggcu

SEQ ID NO: 46070 - RNA, 23 nt, Homo sapiens
uccucucaaccaccuuucagaua

SEQ ID NO: 46071 - RNA, 23 nt, Homo sapiens
uccucuuucaaagguagccauca

SEQ ID NO: 46072 - RNA, 21 nt, Homo sapiens
uccugaaggaggcccugcccu

SEQ ID NO: 46073 - RNA, 22 nt, Homo sapiens
uccugaaggaggcccugcccuu

SEQ ID NO: 46074 - RNA, 15 nt, Homo sapiens
uccugagacacaugg

SEQ ID NO: 46075 - RNA, 16 nt, Homo sapiens
uccugagaccagccaa

SEQ ID NO: 46076 - RNA, 22 nt, Homo sapiens
uccugagaccagccaaccuggg

SEQ ID NO: 46077 - RNA, 22 nt, Homo sapiens
uccugauucauauuuaauuuga

SEQ ID NO: 46078 - RNA, 12 nt, Homo sapiens
uccugcaaugaa

SEQ ID NO: 46079 - RNA, 16 nt, Homo sapiens
uccugccccugagccc

SEQ ID NO: 46080 - RNA, 13 nt, Homo sapiens
uccuggacaguuu

SEQ ID NO: 46081 - RNA, 15 nt, Homo sapiens
uccuggauuccucac

SEQ ID NO: 46082 - RNA, 23 nt, Homo sapiens
uccuggcaaagaugaucaguaug

SEQ ID NO: 46083 - RNA, 21 nt, Homo sapiens
uccugguuccuaggugagcag

SEQ ID NO: 46084 - RNA, 21 nt, Homo sapiens
uccuguacuuuuuccagacac

SEQ ID NO: 46085 - RNA, 13 nt, Homo sapiens
uccugugacuguc

SEQ ID NO: 46086 - RNA, 13 nt, Homo sapiens
uccugugggaccu

SEQ ID NO: 46087 - RNA, 14 nt, Homo sapiens
uccuuacucuugau

SEQ ID NO: 46088 - RNA, 18 nt, Homo sapiens
uccuuagcccaucuuuca

SEQ ID NO: 46089 - RNA, 16 nt, Homo sapiens
uccuuauucagaauuu

SEQ ID NO: 46090 - RNA, 13 nt, Homo sapiens
uccuucagccuga

SEQ ID NO: 46091 - RNA, 22 nt, Homo sapiens
uccuucauggcaggcaucgcca

SEQ ID NO: 46092 - RNA, 13 nt, Homo sapiens
uccuuccuuauca

SEQ ID NO: 46093 - RNA, 20 nt, Homo sapiens
uccuuccuuaucacugacac

SEQ ID NO: 46094 - RNA, 17 nt, Homo sapiens
uccuugaagauuuacca

SEQ ID NO: 46095 - RNA, 11 nt, Homo sapiens
uccuugcugca

SEQ ID NO: 46096 - RNA, 13 nt, Homo sapiens
ucgaacugcugga

SEQ ID NO: 46097 - RNA, 12 nt, Homo sapiens
ucgaaucacuca

SEQ ID NO: 46098 - RNA, 18 nt, Homo sapiens
ucgcaggaccaucccggc

SEQ ID NO: 46099 - RNA, 19 nt, Homo sapiens
ucgcaggaccaucccggcc

SEQ ID NO: 46100 - RNA, 22 nt, Homo sapiens
ucgcaggaccaucccggccggc

SEQ ID NO: 46101 - RNA, 12 nt, Homo sapiens
ucgccacgcucu

SEQ ID NO: 46102 - RNA, 13 nt, Homo sapiens
ucgccacgcucug

SEQ ID NO: 46103 - RNA, 15 nt, Homo sapiens
ucgccacgcucuggg

SEQ ID NO: 46104 - RNA, 21 nt, Homo sapiens
ucgccacgcucugggucgccg

SEQ ID NO: 46105 - RNA, 22 nt, Homo sapiens
ucgccacgcucugggucgccgg

SEQ ID NO: 46106 - RNA, 16 nt, Homo sapiens
ucgccaucacagcuga

SEQ ID NO: 46107 - RNA, 17 nt, Homo sapiens
ucgccauucuugcugaa

SEQ ID NO: 46108 - RNA, 12 nt, Homo sapiens
ucgcccacuucc

SEQ ID NO: 46109 - RNA, 16 nt, Homo sapiens
ucgcccacuuccuccc

SEQ ID NO: 46110 - RNA, 20 nt, Homo sapiens
ucgcccacuuccucccggcc

SEQ ID NO: 46111 - RNA, 23 nt, Homo sapiens
ucgcccacuuccucccggccgcg

SEQ ID NO: 46112 - RNA, 14 nt, Homo sapiens
ucgcgcgccuccgc

SEQ ID NO: 46113 - RNA, 22 nt, Homo sapiens
ucgcugauauauguguuuuuca

SEQ ID NO: 46114 - RNA, 11 nt, Homo sapiens
ucgcuuccgca

SEQ ID NO: 46115 - RNA, 12 nt, Homo sapiens
ucgcuuccgcau

SEQ ID NO: 46116 - RNA, 13 nt, Homo sapiens
ucgcuuccgcauc

SEQ ID NO: 46117 - RNA, 14 nt, Homo sapiens
ucgcuuccgcaucc

SEQ ID NO: 46118 - RNA, 18 nt, Homo sapiens
ucgcuuccgcauccuagu

SEQ ID NO: 46119 - RNA, 12 nt, Homo sapiens
ucggacggcucc

SEQ ID NO: 46120 - RNA, 20 nt, Homo sapiens
ucggaucuggggcucuggga

SEQ ID NO: 46121 - RNA, 21 nt, Homo sapiens
ucggaucuggggcucugggau

SEQ ID NO: 46122 - RNA, 19 nt, Homo sapiens
ucgugguaggacuguagaa

SEQ ID NO: 46123 - RNA, 12 nt, Homo sapiens
ucuaaaaguuua

SEQ ID NO: 46124 - RNA, 18 nt, Homo sapiens
ucuaaaggcuaccuuugu

SEQ ID NO: 46125 - RNA, 15 nt, Homo sapiens
ucuaaguaaaaccac

SEQ ID NO: 46126 - RNA, 16 nt, Homo sapiens
ucuaaguaaaaccaca

SEQ ID NO: 46127 - RNA, 23 nt, Homo sapiens
ucuaauuuaucuugucucugggc

SEQ ID NO: 46128 - RNA, 24 nt, Homo sapiens
ucuaauuuaucuugucucugggcu

SEQ ID NO: 46129 - RNA, 12 nt, Homo sapiens
ucuacacuccag

SEQ ID NO: 46130 - RNA, 12 nt, Homo sapiens
ucuacauacuau

SEQ ID NO: 46131 - RNA, 15 nt, Homo sapiens
ucuacauacuaugga

SEQ ID NO: 46132 - RNA, 18 nt, Homo sapiens
ucuaggacugaauuauga

SEQ ID NO: 46133 - RNA, 12 nt, Homo sapiens
ucuaggccgggc

SEQ ID NO: 46134 - RNA, 12 nt, Homo sapiens
ucuagugagcag

SEQ ID NO: 46135 - RNA, 17 nt, Homo sapiens
ucuaguuugauuaaauu

SEQ ID NO: 46136 - RNA, 18 nt, Homo sapiens
ucuaguuugauuaaauuc

SEQ ID NO: 46137 - RNA, 16 nt, Homo sapiens
ucuaucauuaaaguuc

SEQ ID NO: 46138 - RNA, 18 nt, Homo sapiens
ucuaucauuaaaguucua

SEQ ID NO: 46139 - RNA, 14 nt, Homo sapiens
ucuaugacacaugc

SEQ ID NO: 46140 - RNA, 15 nt, Homo sapiens
ucuaugacacaugca

SEQ ID NO: 46141 - RNA, 17 nt, Homo sapiens
ucuauggcauauugaua

SEQ ID NO: 46142 - RNA, 14 nt, Homo sapiens
ucuauguggcugua

SEQ ID NO: 46143 - RNA, 11 nt, Homo sapiens
ucuauguuaau

SEQ ID NO: 46144 - RNA, 12 nt, Homo sapiens
ucuauguuaaua

SEQ ID NO: 46145 - RNA, 13 nt, Homo sapiens
ucuauuagcccuu

SEQ ID NO: 46146 - RNA, 21 nt, Homo sapiens
ucucaaaacugcacugucaag

SEQ ID NO: 46147 - RNA, 16 nt, Homo sapiens
ucucaaccaccuuuca

SEQ ID NO: 46148 - RNA, 21 nt, Homo sapiens
ucucaaccaccuuucagauaa

SEQ ID NO: 46149 - RNA, 12 nt, Homo sapiens
ucucaauauuuc

SEQ ID NO: 46150 - RNA, 13 nt, Homo sapiens
ucucaauauuuca

SEQ ID NO: 46151 - RNA, 22 nt, Homo sapiens
ucucaauguuuagcagauuuaa

SEQ ID NO: 46152 - RNA, 14 nt, Homo sapiens
ucucacaagcacuu

SEQ ID NO: 46153 - RNA, 20 nt, Homo sapiens
ucucaggggccaacuaggca

SEQ ID NO: 46154 - RNA, 15 nt, Homo sapiens
ucucauccacuuucc

SEQ ID NO: 46155 - RNA, 22 nt, Homo sapiens
ucuccaaaauaaaacuuuuuaa

SEQ ID NO: 46156 - RNA, 23 nt, Homo sapiens
ucuccaaaccacuuuuugcagcu

SEQ ID NO: 46157 - RNA, 13 nt, Homo sapiens
ucuccagccucag

SEQ ID NO: 46158 - RNA, 19 nt, Homo sapiens
ucuccaugaucccaccucc

SEQ ID NO: 46159 - RNA, 20 nt, Homo sapiens
ucuccccaugauguuuagaa

SEQ ID NO: 46160 - RNA, 15 nt, Homo sapiens
ucucgaacugcugga

SEQ ID NO: 46161 - RNA, 16 nt, Homo sapiens
ucucgaacugcuggau

SEQ ID NO: 46162 - RNA, 14 nt, Homo sapiens
ucucuaacucagaa

SEQ ID NO: 46163 - RNA, 16 nt, Homo sapiens
ucucuaacucagaaac

SEQ ID NO: 46164 - RNA, 20 nt, Homo sapiens
ucucuacuaaaaauacaaaa

SEQ ID NO: 46165 - RNA, 22 nt, Homo sapiens
ucucuaucauuaaaguucuagu

SEQ ID NO: 46166 - RNA, 23 nt, Homo sapiens
ucucuccucuccccaugauguuu

SEQ ID NO: 46167 - RNA, 19 nt, Homo sapiens
ucucugaccuccuccuuca

SEQ ID NO: 46168 - RNA, 16 nt, Homo sapiens
ucucuuauagaauauu

SEQ ID NO: 46169 - RNA, 19 nt, Homo sapiens
ucucuuuuuagagaaauuu

SEQ ID NO: 46170 - RNA, 20 nt, Homo sapiens
ucucuuuuuagagaaauuug

SEQ ID NO: 46171 - RNA, 23 nt, Homo sapiens
ucucuuuuuagagaaauuugcca

SEQ ID NO: 46172 - RNA, 13 nt, Homo sapiens
ucugaagaagaug

SEQ ID NO: 46173 - RNA, 22 nt, Homo sapiens
ucugaagaguggguuucacaag

SEQ ID NO: 46174 - RNA, 18 nt, Homo sapiens
ucugaaggguaauuauau

SEQ ID NO: 46175 - RNA, 16 nt, Homo sapiens
ucugaccuccuccuuc

SEQ ID NO: 46176 - RNA, 17 nt, Homo sapiens
ucugauaccucaacccc

SEQ ID NO: 46177 - RNA, 16 nt, Homo sapiens
ucugcaagcuuuucaa

SEQ ID NO: 46178 - RNA, 18 nt, Homo sapiens
ucugccuugguauagcau

SEQ ID NO: 46179 - RNA, 18 nt, Homo sapiens
ucugcuaugcuauugaag

SEQ ID NO: 46180 - RNA, 15 nt, Homo sapiens
ucugcuuuaauuuca

SEQ ID NO: 46181 - RNA, 13 nt, Homo sapiens
ucuggaaaccaca

SEQ ID NO: 46182 - RNA, 14 nt, Homo sapiens
ucuggaaaccacau

SEQ ID NO: 46183 - RNA, 21 nt, Homo sapiens
ucuggaaaccacauggcuuca

SEQ ID NO: 46184 - RNA, 21 nt, Homo sapiens
ucuggaagccucuauugccau

SEQ ID NO: 46185 - RNA, 17 nt, Homo sapiens
ucuggacuuuccagaga

SEQ ID NO: 46186 - RNA, 20 nt, Homo sapiens
ucuggacuuuccagagacca

SEQ ID NO: 46187 - RNA, 17 nt, Homo sapiens
ucuggcuaugcauuuga

SEQ ID NO: 46188 - RNA, 21 nt, Homo sapiens
ucugggauagcugacccagcc

SEQ ID NO: 46189 - RNA, 22 nt, Homo sapiens
ucugggauagcugacccagccc

SEQ ID NO: 46190 - RNA, 20 nt, Homo sapiens
ucugggcuuggggcuuccua

SEQ ID NO: 46191 - RNA, 16 nt, Homo sapiens
ucugggucucaguguc

SEQ ID NO: 46192 - RNA, 13 nt, Homo sapiens
ucuggugugaacu

SEQ ID NO: 46193 - RNA, 17 nt, Homo sapiens
ucuguugccaaggcugg

SEQ ID NO: 46194 - RNA, 18 nt, Homo sapiens
ucuuaaauaauaaagauc

SEQ ID NO: 46195 - RNA, 13 nt, Homo sapiens
ucuuaagacguga

SEQ ID NO: 46196 - RNA, 23 nt, Homo sapiens
ucuuaagacgugauuuugcugua

SEQ ID NO: 46197 - RNA, 14 nt, Homo sapiens
ucuuaauucuuagc

SEQ ID NO: 46198 - RNA, 19 nt, Homo sapiens
ucuuacaaugcauucugag

SEQ ID NO: 46199 - RNA, 19 nt, Homo sapiens
ucuuaguaugugcauuuaa

SEQ ID NO: 46200 - RNA, 21 nt, Homo sapiens
ucuuaguaugugcauuuaauu

SEQ ID NO: 46201 - RNA, 14 nt, Homo sapiens
ucuuaguugcugua

SEQ ID NO: 46202 - RNA, 18 nt, Homo sapiens
ucuuauaucuauauuuua

SEQ ID NO: 46203 - RNA, 21 nt, Homo sapiens
ucuuauccugucccuccucca

SEQ ID NO: 46204 - RNA, 20 nt, Homo sapiens
ucuuauuucauuucuuugag

SEQ ID NO: 46205 - RNA, 13 nt, Homo sapiens
ucuucacagucac

SEQ ID NO: 46206 - RNA, 14 nt, Homo sapiens
ucuuccucccugga

SEQ ID NO: 46207 - RNA, 16 nt, Homo sapiens
ucuuccucccuggaau

SEQ ID NO: 46208 - RNA, 20 nt, Homo sapiens
ucuucucauacuauuuaaga

SEQ ID NO: 46209 - RNA, 16 nt, Homo sapiens
ucuucugacacuaaaa

SEQ ID NO: 46210 - RNA, 21 nt, Homo sapiens
ucuucuuucaugaaggggcgg

SEQ ID NO: 46211 - RNA, 16 nt, Homo sapiens
ucuugauaaauggcuu

SEQ ID NO: 46212 - RNA, 17 nt, Homo sapiens
ucuugcaauucaauaca

SEQ ID NO: 46213 - RNA, 20 nt, Homo sapiens
ucuugggaauuuucuuccaa

SEQ ID NO: 46214 - RNA, 15 nt, Homo sapiens
ucuuggucacauaca

SEQ ID NO: 46215 - RNA, 17 nt, Homo sapiens
ucuuggucucaguguca

SEQ ID NO: 46216 - RNA, 12 nt, Homo sapiens
ucuuggugccuc

SEQ ID NO: 46217 - RNA, 19 nt, Homo sapiens
ucuuggugccucaguuucc

SEQ ID NO: 46218 - RNA, 14 nt, Homo sapiens
ucuugguucugaaa

SEQ ID NO: 46219 - RNA, 22 nt, Homo sapiens
ucuuguaaagguccuggcaaag

SEQ ID NO: 46220 - RNA, 21 nt, Homo sapiens
ucuuguaaggcauacugccuu

SEQ ID NO: 46221 - RNA, 21 nt, Homo sapiens
ucuugugaacccaaaguguga

SEQ ID NO: 46222 - RNA, 19 nt, Homo sapiens
ucuuucaagggaccucucc

SEQ ID NO: 46223 - RNA, 23 nt, Homo sapiens
ucuuucaugaaggggcggcggcc

SEQ ID NO: 46224 - RNA, 18 nt, Homo sapiens
ucuuuccacagaagcucc

SEQ ID NO: 46225 - RNA, 23 nt, Homo sapiens
ugaaaaaguauaaauaaaaugag

SEQ ID NO: 46226 - RNA, 18 nt, Homo sapiens
ugaaaacauagcaucuca

SEQ ID NO: 46227 - RNA, 19 nt, Homo sapiens
ugaaaagauuaugaucuca

SEQ ID NO: 46228 - RNA, 17 nt, Homo sapiens
ugaaaaucuacacucca

SEQ ID NO: 46229 - RNA, 17 nt, Homo sapiens
ugaaaaugucauuguuc

SEQ ID NO: 46230 - RNA, 16 nt, Homo sapiens
ugaaacauuacaguua

SEQ ID NO: 46231 - RNA, 18 nt, Homo sapiens
ugaaagaggcagcuugaa

SEQ ID NO: 46232 - RNA, 18 nt, Homo sapiens
ugaaagcagggacuugaa

SEQ ID NO: 46233 - RNA, 19 nt, Homo sapiens
ugaaagcagggacuugaac

SEQ ID NO: 46234 - RNA, 17 nt, Homo sapiens
ugaaaggcauucucuga

SEQ ID NO: 46235 - RNA, 17 nt, Homo sapiens
ugaaagucccagaucaa

SEQ ID NO: 46236 - RNA, 21 nt, Homo sapiens
ugaaauaagccagacaucaac

SEQ ID NO: 46237 - RNA, 13 nt, Homo sapiens
ugaaauagugucu

SEQ ID NO: 46238 - RNA, 17 nt, Homo sapiens
ugaaauauugacuuuuu

SEQ ID NO: 46239 - RNA, 19 nt, Homo sapiens
ugaaaugauuucacagugu

SEQ ID NO: 46240 - RNA, 19 nt, Homo sapiens
ugaacaaauuuacagagac

SEQ ID NO: 46241 - RNA, 23 nt, Homo sapiens
ugaacaaauuuacagagacagaa

SEQ ID NO: 46242 - RNA, 16 nt, Homo sapiens
ugaacacaaagccugu

SEQ ID NO: 46243 - RNA, 17 nt, Homo sapiens
ugaacaggauauucuca

SEQ ID NO: 46244 - RNA, 12 nt, Homo sapiens
ugaacauuccag

SEQ ID NO: 46245 - RNA, 16 nt, Homo sapiens
ugaacccgggaggcag

SEQ ID NO: 46246 - RNA, 20 nt, Homo sapiens
ugaaccguuugugauugcca

SEQ ID NO: 46247 - RNA, 21 nt, Homo sapiens
ugaaccguuugugauugccau

SEQ ID NO: 46248 - RNA, 16 nt, Homo sapiens
ugaacuaaacuuucac

SEQ ID NO: 46249 - RNA, 19 nt, Homo sapiens
ugaacuagaguuuagcugg

SEQ ID NO: 46250 - RNA, 13 nt, Homo sapiens
ugaagaaguugau

SEQ ID NO: 46251 - RNA, 14 nt, Homo sapiens
ugaagacaaugacu

SEQ ID NO: 46252 - RNA, 16 nt, Homo sapiens
ugaagauuuaauuacu

SEQ ID NO: 46253 - RNA, 21 nt, Homo sapiens
ugaagcacagugaucaaguua

SEQ ID NO: 46254 - RNA, 18 nt, Homo sapiens
ugaagcauuuuauaaauc

SEQ ID NO: 46255 - RNA, 21 nt, Homo sapiens
ugaagcuuuaagaacuaaaau

SEQ ID NO: 46256 - RNA, 19 nt, Homo sapiens
ugaaggaguccuugcauca

SEQ ID NO: 46257 - RNA, 16 nt, Homo sapiens
ugaaggggcggcggcc

SEQ ID NO: 46258 - RNA, 17 nt, Homo sapiens
ugaaggggcggcggccc

SEQ ID NO: 46259 - RNA, 18 nt, Homo sapiens
ugaaggggcggcggcccu

SEQ ID NO: 46260 - RNA, 19 nt, Homo sapiens
ugaagguagaauguuuuca

SEQ ID NO: 46261 - RNA, 14 nt, Homo sapiens
ugaaguaauaugca

SEQ ID NO: 46262 - RNA, 23 nt, Homo sapiens
ugaagugaaacugcuuguuuccu

SEQ ID NO: 46263 - RNA, 18 nt, Homo sapiens
ugaaguuuaauugacuua

SEQ ID NO: 46264 - RNA, 21 nt, Homo sapiens
ugaauaaaguguaaguucaca

SEQ ID NO: 46265 - RNA, 21 nt, Homo sapiens
ugaauaaauuuucuucuuggu

SEQ ID NO: 46266 - RNA, 14 nt, Homo sapiens
ugaauuaugaaacu

SEQ ID NO: 46267 - RNA, 15 nt, Homo sapiens
ugaauuaugaaacuu

SEQ ID NO: 46268 - RNA, 15 nt, Homo sapiens
ugaauucccugccug

SEQ ID NO: 46269 - RNA, 18 nt, Homo sapiens
ugaauucccugccuggau

SEQ ID NO: 46270 - RNA, 19 nt, Homo sapiens
ugaauucccugccuggauc

SEQ ID NO: 46271 - RNA, 22 nt, Homo sapiens
ugaauuuaaauagcuuuuuucu

SEQ ID NO: 46272 - RNA, 17 nt, Homo sapiens
ugacaacugugacugua

SEQ ID NO: 46273 - RNA, 22 nt, Homo sapiens
ugacaacugugacuguacccaa

SEQ ID NO: 46274 - RNA, 22 nt, Homo sapiens
ugacaaggggcaguggugguuu

SEQ ID NO: 46275 - RNA, 21 nt, Homo sapiens
ugacacuaaaacaccucagcu

SEQ ID NO: 46276 - RNA, 17 nt, Homo sapiens
ugacagcccaagggugg

SEQ ID NO: 46277 - RNA, 22 nt, Homo sapiens
ugacagcccaaggguggguggg

SEQ ID NO: 46278 - RNA, 23 nt, Homo sapiens
ugacagcccaagggugggugggg

SEQ ID NO: 46279 - RNA, 15 nt, Homo sapiens
ugacauaucacaugu

SEQ ID NO: 46280 - RNA, 19 nt, Homo sapiens
ugaccaauaaccaugccca

SEQ ID NO: 46281 - RNA, 19 nt, Homo sapiens
ugaccaauauuguacaguu

SEQ ID NO: 46282 - RNA, 17 nt, Homo sapiens
ugaccuccuccuucaug

SEQ ID NO: 46283 - RNA, 14 nt, Homo sapiens
ugacgugacuggcc

SEQ ID NO: 46284 - RNA, 19 nt, Homo sapiens
ugacuauuauagaauggaa

SEQ ID NO: 46285 - RNA, 12 nt, Homo sapiens
ugacucuuaaga

SEQ ID NO: 46286 - RNA, 21 nt, Homo sapiens
ugacuggccugcuggaugugg

SEQ ID NO: 46287 - RNA, 13 nt, Homo sapiens
ugacuuacuguac

SEQ ID NO: 46288 - RNA, 16 nt, Homo sapiens
ugacuuacuguacaug

SEQ ID NO: 46289 - RNA, 17 nt, Homo sapiens
ugacuuacuguacauga

SEQ ID NO: 46290 - RNA, 23 nt, Homo sapiens
ugagaaaccuuauuguaccucuc

SEQ ID NO: 46291 - RNA, 14 nt, Homo sapiens
ugagaacugcauau

SEQ ID NO: 46292 - RNA, 14 nt, Homo sapiens
ugagaagaaugacu

SEQ ID NO: 46293 - RNA, 13 nt, Homo sapiens
ugagacacauggg

SEQ ID NO: 46294 - RNA, 18 nt, Homo sapiens
ugagacacaugggugcua

SEQ ID NO: 46295 - RNA, 13 nt, Homo sapiens
ugagaccaaggcc

SEQ ID NO: 46296 - RNA, 13 nt, Homo sapiens
ugagaccagccaa

SEQ ID NO: 46297 - RNA, 17 nt, Homo sapiens
ugagacucugucucagu

SEQ ID NO: 46298 - RNA, 16 nt, Homo sapiens
ugagagacagcagguc

SEQ ID NO: 46299 - RNA, 18 nt, Homo sapiens
ugagagacagcaggucuc

SEQ ID NO: 46300 - RNA, 22 nt, Homo sapiens
ugagaugggagaaucacuugaa

SEQ ID NO: 46301 - RNA, 23 nt, Homo sapiens
ugagaugggagaaucacuugaac

SEQ ID NO: 46302 - RNA, 12 nt, Homo sapiens
ugagcaccugca

SEQ ID NO: 46303 - RNA, 19 nt, Homo sapiens
ugagcaccugcaggcguga

SEQ ID NO: 46304 - RNA, 19 nt, Homo sapiens
ugagcagucaggaaagaga

SEQ ID NO: 46305 - RNA, 23 nt, Homo sapiens
ugagcaucacaguuuugguugcu

SEQ ID NO: 46306 - RNA, 20 nt, Homo sapiens
ugagcaugccccugaaccau

SEQ ID NO: 46307 - RNA, 22 nt, Homo sapiens
ugagccaccaaacccggccuga

SEQ ID NO: 46308 - RNA, 21 nt, Homo sapiens
ugagccagugcuuuaauggca

SEQ ID NO: 46309 - RNA, 22 nt, Homo sapiens
ugagccagugcuuuaauggcau

SEQ ID NO: 46310 - RNA, 14 nt, Homo sapiens
ugagccuugaacuu

SEQ ID NO: 46311 - RNA, 15 nt, Homo sapiens
ugagccuuuguugcu

SEQ ID NO: 46312 - RNA, 20 nt, Homo sapiens
ugagccuuuguugcuaucaa

SEQ ID NO: 46313 - RNA, 14 nt, Homo sapiens
ugagcggaccuucc

SEQ ID NO: 46314 - RNA, 17 nt, Homo sapiens
ugagcggaccuucccag

SEQ ID NO: 46315 - RNA, 20 nt, Homo sapiens
ugagcggaccuucccagcua

SEQ ID NO: 46316 - RNA, 17 nt, Homo sapiens
ugaggaauauuugcaag

SEQ ID NO: 46317 - RNA, 19 nt, Homo sapiens
ugaggacuugggcgggaca

SEQ ID NO: 46318 - RNA, 17 nt, Homo sapiens
ugaggcauuugcagcug

SEQ ID NO: 46319 - RNA, 21 nt, Homo sapiens
ugaggcggguggaucacuuga

SEQ ID NO: 46320 - RNA, 22 nt, Homo sapiens
ugaggcuuuaaaacuuauccuc

SEQ ID NO: 46321 - RNA, 15 nt, Homo sapiens
ugagggcuugaggac

SEQ ID NO: 46322 - RNA, 12 nt, Homo sapiens
ugagguaaccuc

SEQ ID NO: 46323 - RNA, 16 nt, Homo sapiens
ugaguacguugugcau

SEQ ID NO: 46324 - RNA, 18 nt, Homo sapiens
ugagugccuguaaucaca

SEQ ID NO: 46325 - RNA, 19 nt, Homo sapiens
ugagugccuguaaucacag

SEQ ID NO: 46326 - RNA, 17 nt, Homo sapiens
ugaguggaugauguuuc

SEQ ID NO: 46327 - RNA, 22 nt, Homo sapiens
ugaguguugccuaauuuguuuu

SEQ ID NO: 46328 - RNA, 23 nt, Homo sapiens
ugauaaagaugagugagcaugcc

SEQ ID NO: 46329 - RNA, 13 nt, Homo sapiens
ugauaauuugcua

SEQ ID NO: 46330 - RNA, 12 nt, Homo sapiens
ugauacagaaaa

SEQ ID NO: 46331 - RNA, 16 nt, Homo sapiens
ugauagaggcuggcgg

SEQ ID NO: 46332 - RNA, 19 nt, Homo sapiens
ugauaugggucuugauaaa

SEQ ID NO: 46333 - RNA, 23 nt, Homo sapiens
ugauccugcaauuccacuuauag

SEQ ID NO: 46334 - RNA, 14 nt, Homo sapiens
ugaugaauguuaaa

SEQ ID NO: 46335 - RNA, 11 nt, Homo sapiens
ugaugcugagc

SEQ ID NO: 46336 - RNA, 13 nt, Homo sapiens
ugaugcugagccc

SEQ ID NO: 46337 - RNA, 17 nt, Homo sapiens
ugaugcugagcccggaa

SEQ ID NO: 46338 - RNA, 13 nt, Homo sapiens
ugauguuuuaagg

SEQ ID NO: 46339 - RNA, 15 nt, Homo sapiens
ugauuaaauucuugc

SEQ ID NO: 46340 - RNA, 12 nt, Homo sapiens
ugauuaaguaau

SEQ ID NO: 46341 - RNA, 17 nt, Homo sapiens
ugauuacaaggcuuuau

SEQ ID NO: 46342 - RNA, 13 nt, Homo sapiens
ugauucauauuua

SEQ ID NO: 46343 - RNA, 22 nt, Homo sapiens
ugauucauauuuaauuugaaga

SEQ ID NO: 46344 - RNA, 18 nt, Homo sapiens
ugauuccaccuacaugag

SEQ ID NO: 46345 - RNA, 22 nt, Homo sapiens
ugauucccuccugcuacucugu

SEQ ID NO: 46346 - RNA, 19 nt, Homo sapiens
ugauuuggggauauuuuuu

SEQ ID NO: 46347 - RNA, 20 nt, Homo sapiens
ugauuuggggauauuuuuuu

SEQ ID NO: 46348 - RNA, 14 nt, Homo sapiens
ugauuuuacaauug

SEQ ID NO: 46349 - RNA, 19 nt, Homo sapiens
ugauuuuauaugcuauuua

SEQ ID NO: 46350 - RNA, 15 nt, Homo sapiens
ugauuuuuguaauuu

SEQ ID NO: 46351 - RNA, 13 nt, Homo sapiens
ugcaaagcacuga

SEQ ID NO: 46352 - RNA, 12 nt, Homo sapiens
ugcaaauuguca

SEQ ID NO: 46353 - RNA, 13 nt, Homo sapiens
ugcaaauugucac

SEQ ID NO: 46354 - RNA, 14 nt, Homo sapiens
ugcaaauugucaca

SEQ ID NO: 46355 - RNA, 23 nt, Homo sapiens
ugcaacaugccagccacugugau

SEQ ID NO: 46356 - RNA, 17 nt, Homo sapiens
ugcaaccuccaccuucu

SEQ ID NO: 46357 - RNA, 12 nt, Homo sapiens
ugcaagacauag

SEQ ID NO: 46358 - RNA, 21 nt, Homo sapiens
ugcaagacauagaauaguguu

SEQ ID NO: 46359 - RNA, 19 nt, Homo sapiens
ugcaagcuuuucaaaauug

SEQ ID NO: 46360 - RNA, 22 nt, Homo sapiens
ugcaaucuucucagaaggcaaa

SEQ ID NO: 46361 - RNA, 23 nt, Homo sapiens
ugcacacauuuuuuaaaugcacc

SEQ ID NO: 46362 - RNA, 14 nt, Homo sapiens
ugcacacucuccca

SEQ ID NO: 46363 - RNA, 11 nt, Homo sapiens
ugcacaucaaa

SEQ ID NO: 46364 - RNA, 15 nt, Homo sapiens
ugcacaucuguuuug

SEQ ID NO: 46365 - RNA, 13 nt, Homo sapiens
ugcagacaugaga

SEQ ID NO: 46366 - RNA, 13 nt, Homo sapiens
ugcagauauucuc

SEQ ID NO: 46367 - RNA, 22 nt, Homo sapiens
ugcagcccccauuguggucaca

SEQ ID NO: 46368 - RNA, 17 nt, Homo sapiens
ugcagccccugggacca

SEQ ID NO: 46369 - RNA, 15 nt, Homo sapiens
ugcagcccugcugcu

SEQ ID NO: 46370 - RNA, 17 nt, Homo sapiens
ugcagcgaguacuuccc

SEQ ID NO: 46371 - RNA, 18 nt, Homo sapiens
ugcagcgaguacuucccg

SEQ ID NO: 46372 - RNA, 15 nt, Homo sapiens
ugcagcugugccaua

SEQ ID NO: 46373 - RNA, 11 nt, Homo sapiens
ugcaggcguga

SEQ ID NO: 46374 - RNA, 12 nt, Homo sapiens
ugcagugagccg

SEQ ID NO: 46375 - RNA, 13 nt, Homo sapiens
ugcagugagccga

SEQ ID NO: 46376 - RNA, 21 nt, Homo sapiens
ugcaguguuucccucuguguu

SEQ ID NO: 46377 - RNA, 15 nt, Homo sapiens
ugcaguucugaagaa

SEQ ID NO: 46378 - RNA, 17 nt, Homo sapiens
ugcaguucugaagaaga

SEQ ID NO: 46379 - RNA, 14 nt, Homo sapiens
ugcauacaaucuga

SEQ ID NO: 46380 - RNA, 14 nt, Homo sapiens
ugcauacaguaauu

SEQ ID NO: 46381 - RNA, 16 nt, Homo sapiens
ugcauauuuuauuaua

SEQ ID NO: 46382 - RNA, 20 nt, Homo sapiens
ugcauauuuuauuauaguca

SEQ ID NO: 46383 - RNA, 15 nt, Homo sapiens
ugcaucagcugcuga

SEQ ID NO: 46384 - RNA, 23 nt, Homo sapiens
ugcaugaaguaauaugcacacau

SEQ ID NO: 46385 - RNA, 13 nt, Homo sapiens
ugcauuauauuua

SEQ ID NO: 46386 - RNA, 16 nt, Homo sapiens
ugcauuauauuuauua

SEQ ID NO: 46387 - RNA, 20 nt, Homo sapiens
ugcauucugagguaaccuca

SEQ ID NO: 46388 - RNA, 14 nt, Homo sapiens
ugcauuuaauuaga

SEQ ID NO: 46389 - RNA, 17 nt, Homo sapiens
ugcauuuaauuuauuga

SEQ ID NO: 46390 - RNA, 13 nt, Homo sapiens
ugcauuugcacua

SEQ ID NO: 46391 - RNA, 14 nt, Homo sapiens
ugcauuugcacuau

SEQ ID NO: 46392 - RNA, 15 nt, Homo sapiens
ugcauuuggugguuu

SEQ ID NO: 46393 - RNA, 17 nt, Homo sapiens
ugccaaggcuggagugc

SEQ ID NO: 46394 - RNA, 13 nt, Homo sapiens
ugccaccuccugc

SEQ ID NO: 46395 - RNA, 14 nt, Homo sapiens
ugccauaauuacua

SEQ ID NO: 46396 - RNA, 15 nt, Homo sapiens
ugccaugagaguucu

SEQ ID NO: 46397 - RNA, 15 nt, Homo sapiens
ugccauuugagcucu

SEQ ID NO: 46398 - RNA, 15 nt, Homo sapiens
ugcccaagaaugaga

SEQ ID NO: 46399 - RNA, 22 nt, Homo sapiens
ugcccaagaaugagaagaauga

SEQ ID NO: 46400 - RNA, 16 nt, Homo sapiens
ugccccagggaccuuu

SEQ ID NO: 46401 - RNA, 11 nt, Homo sapiens
ugccccgggga

SEQ ID NO: 46402 - RNA, 13 nt, Homo sapiens
ugccccggggagg

SEQ ID NO: 46403 - RNA, 15 nt, Homo sapiens
ugccccggggagggg

SEQ ID NO: 46404 - RNA, 19 nt, Homo sapiens
ugccccggggaggggcgcu

SEQ ID NO: 46405 - RNA, 21 nt, Homo sapiens
ugccccggggaggggcgcucg

SEQ ID NO: 46406 - RNA, 16 nt, Homo sapiens
ugccccugcacuccag

SEQ ID NO: 46407 - RNA, 17 nt, Homo sapiens
ugccccugcacuccagc

SEQ ID NO: 46408 - RNA, 17 nt, Homo sapiens
ugcccuaaaguguauuu

SEQ ID NO: 46409 - RNA, 22 nt, Homo sapiens
ugcccugaaagucccagaucaa

SEQ ID NO: 46410 - RNA, 15 nt, Homo sapiens
ugcccuuacaggaac

SEQ ID NO: 46411 - RNA, 13 nt, Homo sapiens
ugcccuuccccuu

SEQ ID NO: 46412 - RNA, 20 nt, Homo sapiens
ugcccuuccccuucccacac

SEQ ID NO: 46413 - RNA, 19 nt, Homo sapiens
ugccgugggccugagacca

SEQ ID NO: 46414 - RNA, 16 nt, Homo sapiens
ugccuaagugcagccc

SEQ ID NO: 46415 - RNA, 17 nt, Homo sapiens
ugccuaagugcagcccc

SEQ ID NO: 46416 - RNA, 21 nt, Homo sapiens
ugccucaccucucaccuccca

SEQ ID NO: 46417 - RNA, 21 nt, Homo sapiens
ugccucagaaaacaaggauga

SEQ ID NO: 46418 - RNA, 13 nt, Homo sapiens
ugccuccccagcu

SEQ ID NO: 46419 - RNA, 16 nt, Homo sapiens
ugccuccccagcucua

SEQ ID NO: 46420 - RNA, 18 nt, Homo sapiens
ugccucucucauccacuu

SEQ ID NO: 46421 - RNA, 15 nt, Homo sapiens
ugccucuugcaauuc

SEQ ID NO: 46422 - RNA, 11 nt, Homo sapiens
ugccuggaucu

SEQ ID NO: 46423 - RNA, 22 nt, Homo sapiens
ugccuggaucucacaagcacuu

SEQ ID NO: 46424 - RNA, 14 nt, Homo sapiens
ugccuguaaucaca

SEQ ID NO: 46425 - RNA, 18 nt, Homo sapiens
ugccuugguauagcauau

SEQ ID NO: 46426 - RNA, 17 nt, Homo sapiens
ugccuuguuuaauguua

SEQ ID NO: 46427 - RNA, 15 nt, Homo sapiens
ugcgcgccgcgcucc

SEQ ID NO: 46428 - RNA, 16 nt, Homo sapiens
ugcgcgccgcgcuccu

SEQ ID NO: 46429 - RNA, 18 nt, Homo sapiens
ugcgcgccgcgcuccucg

SEQ ID NO: 46430 - RNA, 13 nt, Homo sapiens
ugcgcucggccug

SEQ ID NO: 46431 - RNA, 14 nt, Homo sapiens
ugcgcucggccugc

SEQ ID NO: 46432 - RNA, 16 nt, Homo sapiens
ugcgcucggccugcuc

SEQ ID NO: 46433 - RNA, 17 nt, Homo sapiens
ugcgcucggccugcucg

SEQ ID NO: 46434 - RNA, 13 nt, Homo sapiens
ugcuaagugaaau

SEQ ID NO: 46435 - RNA, 16 nt, Homo sapiens
ugcuacaaaaacacag

SEQ ID NO: 46436 - RNA, 18 nt, Homo sapiens
ugcuacaaaaacacagca

SEQ ID NO: 46437 - RNA, 16 nt, Homo sapiens
ugcuaguuuauauaga

SEQ ID NO: 46438 - RNA, 13 nt, Homo sapiens
ugcuaucaaucca

SEQ ID NO: 46439 - RNA, 16 nt, Homo sapiens
ugcuaucgccaucaca

SEQ ID NO: 46440 - RNA, 13 nt, Homo sapiens
ugcuaugcuauug

SEQ ID NO: 46441 - RNA, 14 nt, Homo sapiens
ugcuaugcuauuga

SEQ ID NO: 46442 - RNA, 18 nt, Homo sapiens
ugcucauggaauuggagc

SEQ ID NO: 46443 - RNA, 20 nt, Homo sapiens
ugcucauggaauuggagcuc

SEQ ID NO: 46444 - RNA, 20 nt, Homo sapiens
ugcuccuggcuggggccugu

SEQ ID NO: 46445 - RNA, 21 nt, Homo sapiens
ugcuccuggcuggggccuguu

SEQ ID NO: 46446 - RNA, 21 nt, Homo sapiens
ugcucgcccacuuccucccgg

SEQ ID NO: 46447 - RNA, 15 nt, Homo sapiens
ugcugaaacaacaaa

SEQ ID NO: 46448 - RNA, 13 nt, Homo sapiens
ugcugaaugacua

SEQ ID NO: 46449 - RNA, 13 nt, Homo sapiens
ugcugcaccugug

SEQ ID NO: 46450 - RNA, 12 nt, Homo sapiens
ugcugccguggg

SEQ ID NO: 46451 - RNA, 16 nt, Homo sapiens
ugcugccgugggccug

SEQ ID NO: 46452 - RNA, 19 nt, Homo sapiens
ugcugccgugggccugaga

SEQ ID NO: 46453 - RNA, 12 nt, Homo sapiens
ugcuggagcucu

SEQ ID NO: 46454 - RNA, 15 nt, Homo sapiens
ugcuggauucaagug

SEQ ID NO: 46455 - RNA, 12 nt, Homo sapiens
ugcuggccaggc

SEQ ID NO: 46456 - RNA, 18 nt, Homo sapiens
ugcuggccaggcuggucu

SEQ ID NO: 46457 - RNA, 19 nt, Homo sapiens
ugcuggccaggcuggucuc

SEQ ID NO: 46458 - RNA, 22 nt, Homo sapiens
ugcuggcuuaaaauguaauuaa

SEQ ID NO: 46459 - RNA, 13 nt, Homo sapiens
ugcugggaauuac

SEQ ID NO: 46460 - RNA, 20 nt, Homo sapiens
ugcugggaauuacaggcgug

SEQ ID NO: 46461 - RNA, 23 nt, Homo sapiens
ugcugggaauuacaggcgugagc

SEQ ID NO: 46462 - RNA, 13 nt, Homo sapiens
ugcugguggcgcu

SEQ ID NO: 46463 - RNA, 15 nt, Homo sapiens
ugcugguggcgcugg

SEQ ID NO: 46464 - RNA, 16 nt, Homo sapiens
ugcugguggcgcuggc

SEQ ID NO: 46465 - RNA, 20 nt, Homo sapiens
ugcugguggcgcuggcugcg

SEQ ID NO: 46466 - RNA, 21 nt, Homo sapiens
ugcuguagaagauggcacuua

SEQ ID NO: 46467 - RNA, 13 nt, Homo sapiens
ugcuguauuuuaa

SEQ ID NO: 46468 - RNA, 20 nt, Homo sapiens
ugcuguuuccuagcgcagcc

SEQ ID NO: 46469 - RNA, 16 nt, Homo sapiens
ugcuucuguuuuauaa

SEQ ID NO: 46470 - RNA, 12 nt, Homo sapiens
ugcuuggcccag

SEQ ID NO: 46471 - RNA, 13 nt, Homo sapiens
ugcuuggcccagg

SEQ ID NO: 46472 - RNA, 14 nt, Homo sapiens
ugcuuggcccagga

SEQ ID NO: 46473 - RNA, 12 nt, Homo sapiens
ugcuuguacaua

SEQ ID NO: 46474 - RNA, 13 nt, Homo sapiens
ugcuuugugauuu

SEQ ID NO: 46475 - RNA, 21 nt, Homo sapiens
uggaaaaaaaggaagaaauuc

SEQ ID NO: 46476 - RNA, 14 nt, Homo sapiens
uggaaaaugugcaa

SEQ ID NO: 46477 - RNA, 16 nt, Homo sapiens
uggaaaaugugcaaua

SEQ ID NO: 46478 - RNA, 22 nt, Homo sapiens
uggaaacaagucagucauucag

SEQ ID NO: 46479 - RNA, 14 nt, Homo sapiens
uggaaacguauuca

SEQ ID NO: 46480 - RNA, 15 nt, Homo sapiens
uggaaaggcagcucu

SEQ ID NO: 46481 - RNA, 19 nt, Homo sapiens
uggaaauaaaagauuguau

SEQ ID NO: 46482 - RNA, 14 nt, Homo sapiens
uggaacucaaggaa

SEQ ID NO: 46483 - RNA, 15 nt, Homo sapiens
uggaacucaaggaaa

SEQ ID NO: 46484 - RNA, 18 nt, Homo sapiens
uggaagccucuauugcca

SEQ ID NO: 46485 - RNA, 21 nt, Homo sapiens
uggaagccucuauugccauga

SEQ ID NO: 46486 - RNA, 14 nt, Homo sapiens
uggaaguaaauguu

SEQ ID NO: 46487 - RNA, 14 nt, Homo sapiens
uggaauacucuuau

SEQ ID NO: 46488 - RNA, 18 nt, Homo sapiens
uggaauauguaaauagaa

SEQ ID NO: 46489 - RNA, 17 nt, Homo sapiens
uggaaucauaugggaua

SEQ ID NO: 46490 - RNA, 13 nt, Homo sapiens
uggaaucuuguaa

SEQ ID NO: 46491 - RNA, 15 nt, Homo sapiens
uggacuuccauuugg

SEQ ID NO: 46492 - RNA, 17 nt, Homo sapiens
uggagaaaggacccuca

SEQ ID NO: 46493 - RNA, 11 nt, Homo sapiens
uggagacacca

SEQ ID NO: 46494 - RNA, 12 nt, Homo sapiens
uggagacaccac

SEQ ID NO: 46495 - RNA, 17 nt, Homo sapiens
uggagacaccaccaccc

SEQ ID NO: 46496 - RNA, 16 nt, Homo sapiens
uggagcuagaauuuga

SEQ ID NO: 46497 - RNA, 21 nt, Homo sapiens
uggagcucugcccauccugcc

SEQ ID NO: 46498 - RNA, 18 nt, Homo sapiens
uggagcugccucucucau

SEQ ID NO: 46499 - RNA, 18 nt, Homo sapiens
uggagugcaguggcgcaa

SEQ ID NO: 46500 - RNA, 18 nt, Homo sapiens
uggaucucacaagcacuu

SEQ ID NO: 46501 - RNA, 19 nt, Homo sapiens
uggaucucacaagcacuuu

SEQ ID NO: 46502 - RNA, 22 nt, Homo sapiens
uggauguggagggggcgcgugc

SEQ ID NO: 46503 - RNA, 13 nt, Homo sapiens
uggauucaaguga

SEQ ID NO: 46504 - RNA, 15 nt, Homo sapiens
uggauucaagugauc

SEQ ID NO: 46505 - RNA, 21 nt, Homo sapiens
uggauucaauuuuaaggcaua

SEQ ID NO: 46506 - RNA, 14 nt, Homo sapiens
uggauucauauuua

SEQ ID NO: 46507 - RNA, 23 nt, Homo sapiens
uggauugugccuaauguguuuga

SEQ ID NO: 46508 - RNA, 19 nt, Homo sapiens
uggcaaagaugaucaguau

SEQ ID NO: 46509 - RNA, 22 nt, Homo sapiens
uggcaaaucucuauuaggaaau

SEQ ID NO: 46510 - RNA, 19 nt, Homo sapiens
uggcacaguuuucugagaa

SEQ ID NO: 46511 - RNA, 14 nt, Homo sapiens
uggcacaucagcac

SEQ ID NO: 46512 - RNA, 23 nt, Homo sapiens
uggcaccgcuguacgcgagcgcg

SEQ ID NO: 46513 - RNA, 13 nt, Homo sapiens
uggcacuugggac

SEQ ID NO: 46514 - RNA, 14 nt, Homo sapiens
uggcacuugggaca

SEQ ID NO: 46515 - RNA, 16 nt, Homo sapiens
uggcacuugggacaaa

SEQ ID NO: 46516 - RNA, 17 nt, Homo sapiens
uggcaggaggcauccaa

SEQ ID NO: 46517 - RNA, 15 nt, Homo sapiens
uggccagaagucaag

SEQ ID NO: 46518 - RNA, 17 nt, Homo sapiens
uggccagaagucaaggc

SEQ ID NO: 46519 - RNA, 18 nt, Homo sapiens
uggccagaagucaaggcu

SEQ ID NO: 46520 - RNA, 20 nt, Homo sapiens
uggccagaagucaaggcuua

SEQ ID NO: 46521 - RNA, 23 nt, Homo sapiens
uggccagaagucaaggcuuagac

SEQ ID NO: 46522 - RNA, 15 nt, Homo sapiens
uggccaggcuggucu

SEQ ID NO: 46523 - RNA, 13 nt, Homo sapiens
uggccagugagau

SEQ ID NO: 46524 - RNA, 21 nt, Homo sapiens
uggccagugagaucaauguga

SEQ ID NO: 46525 - RNA, 17 nt, Homo sapiens
uggcccaggaguuuggc

SEQ ID NO: 46526 - RNA, 19 nt, Homo sapiens
uggcccaggaguuuggcca

SEQ ID NO: 46527 - RNA, 21 nt, Homo sapiens
uggcccaggaguuuggccaga

SEQ ID NO: 46528 - RNA, 22 nt, Homo sapiens
uggcccaggaguuuggccagaa

SEQ ID NO: 46529 - RNA, 22 nt, Homo sapiens
uggccuagcauacguacacauu

SEQ ID NO: 46530 - RNA, 11 nt, Homo sapiens
uggccugcugg

SEQ ID NO: 46531 - RNA, 12 nt, Homo sapiens
uggccugcugga

SEQ ID NO: 46532 - RNA, 13 nt, Homo sapiens
uggccugcuggau

SEQ ID NO: 46533 - RNA, 12 nt, Homo sapiens
uggcgcgcgcca

SEQ ID NO: 46534 - RNA, 16 nt, Homo sapiens
uggcgcgcgccaccac

SEQ ID NO: 46535 - RNA, 17 nt, Homo sapiens
uggcgcgcgccaccacg

SEQ ID NO: 46536 - RNA, 18 nt, Homo sapiens
uggcgcgcgccaccacgc

SEQ ID NO: 46537 - RNA, 21 nt, Homo sapiens
uggcgcgcgccaccacgccca

SEQ ID NO: 46538 - RNA, 15 nt, Homo sapiens
uggcgcuggcugcgc

SEQ ID NO: 46539 - RNA, 16 nt, Homo sapiens
uggcgcuggcugcgcu

SEQ ID NO: 46540 - RNA, 20 nt, Homo sapiens
uggcgcuggcugcgcucggc

SEQ ID NO: 46541 - RNA, 21 nt, Homo sapiens
uggcgcuggcugcgcucggcc

SEQ ID NO: 46542 - RNA, 23 nt, Homo sapiens
uggcguuguggggaugaacuuuu

SEQ ID NO: 46543 - RNA, 21 nt, Homo sapiens
uggcuaagcaaaaugugauau

SEQ ID NO: 46544 - RNA, 14 nt, Homo sapiens
uggcugcgcucggc

SEQ ID NO: 46545 - RNA, 15 nt, Homo sapiens
uggcugcgcucggcc

SEQ ID NO: 46546 - RNA, 15 nt, Homo sapiens
uggcugcugguggcg

SEQ ID NO: 46547 - RNA, 19 nt, Homo sapiens
uggcugcugguggcgcugg

SEQ ID NO: 46548 - RNA, 23 nt, Homo sapiens
uggcugcugguggcgcuggcugc

SEQ ID NO: 46549 - RNA, 22 nt, Homo sapiens
uggcuugccucuugcaauucaa

SEQ ID NO: 46550 - RNA, 16 nt, Homo sapiens
uggcuuuugugcauua

SEQ ID NO: 46551 - RNA, 14 nt, Homo sapiens
ugggaaagcauugu

SEQ ID NO: 46552 - RNA, 17 nt, Homo sapiens
ugggacaguuccugaga

SEQ ID NO: 46553 - RNA, 14 nt, Homo sapiens
ugggagaaucacuu

SEQ ID NO: 46554 - RNA, 18 nt, Homo sapiens
ugggagaaucacuugaac

SEQ ID NO: 46555 - RNA, 20 nt, Homo sapiens
ugggagaaucacuugaaccc

SEQ ID NO: 46556 - RNA, 19 nt, Homo sapiens
ugggagcuuuuguagaagu

SEQ ID NO: 46557 - RNA, 17 nt, Homo sapiens
ugggauagcugacccag

SEQ ID NO: 46558 - RNA, 10 nt, Homo sapiens
ugggcagguc

SEQ ID NO: 46559 - RNA, 11 nt, Homo sapiens
ugggcagguca

SEQ ID NO: 46560 - RNA, 12 nt, Homo sapiens
ugggcaggucac

SEQ ID NO: 46561 - RNA, 16 nt, Homo sapiens
ugggccugagaccaag

SEQ ID NO: 46562 - RNA, 17 nt, Homo sapiens
ugggccugagaccaagg

SEQ ID NO: 46563 - RNA, 15 nt, Homo sapiens
ugggcugagcaguca

SEQ ID NO: 46564 - RNA, 18 nt, Homo sapiens
uggggagccaacagaagc

SEQ ID NO: 46565 - RNA, 18 nt, Homo sapiens
uggggcagugcuuggccc

SEQ ID NO: 46566 - RNA, 19 nt, Homo sapiens
uggggcagugcuuggccca

SEQ ID NO: 46567 - RNA, 20 nt, Homo sapiens
uggggcagugcuuggcccag

SEQ ID NO: 46568 - RNA, 18 nt, Homo sapiens
uggggcugaugcaguugu

SEQ ID NO: 46569 - RNA, 13 nt, Homo sapiens
uggggugggggug

SEQ ID NO: 46570 - RNA, 15 nt, Homo sapiens
ugggguggguggggc

SEQ ID NO: 46571 - RNA, 16 nt, Homo sapiens
ugggguugggggggag

SEQ ID NO: 46572 - RNA, 11 nt, Homo sapiens
ugggucgccgg

SEQ ID NO: 46573 - RNA, 12 nt, Homo sapiens
ugggucgccggc

SEQ ID NO: 46574 - RNA, 15 nt, Homo sapiens
ugggucgccggcauc

SEQ ID NO: 46575 - RNA, 12 nt, Homo sapiens
uggguggggcag

SEQ ID NO: 46576 - RNA, 21 nt, Homo sapiens
uggguggggcagugcuuggcc

SEQ ID NO: 46577 - RNA, 14 nt, Homo sapiens
uggguggggugagg

SEQ ID NO: 46578 - RNA, 17 nt, Homo sapiens
uggguuguguguuuauu

SEQ ID NO: 46579 - RNA, 21 nt, Homo sapiens
ugguaguuuuacaguguuucu

SEQ ID NO: 46580 - RNA, 14 nt, Homo sapiens
uggucacauacaau

SEQ ID NO: 46581 - RNA, 18 nt, Homo sapiens
ugguccgaagucuuccau

SEQ ID NO: 46582 - RNA, 20 nt, Homo sapiens
uggucuaccuguucgcgcgc

SEQ ID NO: 46583 - RNA, 21 nt, Homo sapiens
uggucuaccuguucgcgcgcc

SEQ ID NO: 46584 - RNA, 12 nt, Homo sapiens
uggucucagugu

SEQ ID NO: 46585 - RNA, 18 nt, Homo sapiens
uggucuggagggaagccu

SEQ ID NO: 46586 - RNA, 13 nt, Homo sapiens
ugguggcgcuggc

SEQ ID NO: 46587 - RNA, 11 nt, Homo sapiens
uggugugauuu

SEQ ID NO: 46588 - RNA, 21 nt, Homo sapiens
ugguuauuuagggaacugcuu

SEQ ID NO: 46589 - RNA, 12 nt, Homo sapiens
uguaaaauaagg

SEQ ID NO: 46590 - RNA, 22 nt, Homo sapiens
uguaaagcuuugugcagauucu

SEQ ID NO: 46591 - RNA, 16 nt, Homo sapiens
uguaaauagcuaagau

SEQ ID NO: 46592 - RNA, 22 nt, Homo sapiens
uguaacuguaaagaugaauguc

SEQ ID NO: 46593 - RNA, 22 nt, Homo sapiens
uguaagacaaaaagcuacuuau

SEQ ID NO: 46594 - RNA, 21 nt, Homo sapiens
uguaaguaaacggucucucac

SEQ ID NO: 46595 - RNA, 22 nt, Homo sapiens
uguaaguuuaugcauacaguaa

SEQ ID NO: 46596 - RNA, 20 nt, Homo sapiens
uguaauagaaauaaaccuau

SEQ ID NO: 46597 - RNA, 19 nt, Homo sapiens
uguaaucccagcuacuugg

SEQ ID NO: 46598 - RNA, 18 nt, Homo sapiens
uguaauuugugauacaau

SEQ ID NO: 46599 - RNA, 14 nt, Homo sapiens
uguacagucuugua

SEQ ID NO: 46600 - RNA, 22 nt, Homo sapiens
uguacaguuuuuauugcuuguu

SEQ ID NO: 46601 - RNA, 18 nt, Homo sapiens
uguacauuuccaaauuca

SEQ ID NO: 46602 - RNA, 18 nt, Homo sapiens
uguagaagauggcacuua

SEQ ID NO: 46603 - RNA, 19 nt, Homo sapiens
uguagaauauauuuccuua

SEQ ID NO: 46604 - RNA, 19 nt, Homo sapiens
uguagauaaacucagaaau

SEQ ID NO: 46605 - RNA, 15 nt, Homo sapiens
uguagauaaagcacu

SEQ ID NO: 46606 - RNA, 16 nt, Homo sapiens
uguagcauccuggaau

SEQ ID NO: 46607 - RNA, 12 nt, Homo sapiens
uguagcucucug

SEQ ID NO: 46608 - RNA, 15 nt, Homo sapiens
uguaguguuggagaa

SEQ ID NO: 46609 - RNA, 18 nt, Homo sapiens
uguauaaaauaauuuuua

SEQ ID NO: 46610 - RNA, 20 nt, Homo sapiens
uguauaaaauaauuuuuaua

SEQ ID NO: 46611 - RNA, 21 nt, Homo sapiens
uguauauuuuauaucaauuua

SEQ ID NO: 46612 - RNA, 16 nt, Homo sapiens
uguaucuuauucacau

SEQ ID NO: 46613 - RNA, 21 nt, Homo sapiens
uguauguaaauagcuaagaua

SEQ ID NO: 46614 - RNA, 9 nt, Homo sapiens
uguauucuu

SEQ ID NO: 46615 - RNA, 14 nt, Homo sapiens
uguauuuuaaaaga

SEQ ID NO: 46616 - RNA, 17 nt, Homo sapiens
uguauuuuauuacaucu

SEQ ID NO: 46617 - RNA, 14 nt, Homo sapiens
ugucaaugcagccc

SEQ ID NO: 46618 - RNA, 16 nt, Homo sapiens
ugucagccacugugau

SEQ ID NO: 46619 - RNA, 20 nt, Homo sapiens
uguccauucuuccucccauu

SEQ ID NO: 46620 - RNA, 17 nt, Homo sapiens
uguccgcuauccaccaa

SEQ ID NO: 46621 - RNA, 16 nt, Homo sapiens
ugucucaguccaugaa

SEQ ID NO: 46622 - RNA, 21 nt, Homo sapiens
ugucucggagggauuccccua

SEQ ID NO: 46623 - RNA, 21 nt, Homo sapiens
ugucuuaauuaaaagaauauu

SEQ ID NO: 46624 - RNA, 18 nt, Homo sapiens
ugucuucauagcagauuu

SEQ ID NO: 46625 - RNA, 23 nt, Homo sapiens
ugugaaacuggauuaaacuuaau

SEQ ID NO: 46626 - RNA, 15 nt, Homo sapiens
ugugaacacaucagc

SEQ ID NO: 46627 - RNA, 19 nt, Homo sapiens
ugugaacacaucagcuugc

SEQ ID NO: 46628 - RNA, 14 nt, Homo sapiens
ugugaacccaaagu

SEQ ID NO: 46629 - RNA, 16 nt, Homo sapiens
ugugaacccaaagugu

SEQ ID NO: 46630 - RNA, 18 nt, Homo sapiens
ugugaacccaaaguguga

SEQ ID NO: 46631 - RNA, 10 nt, Homo sapiens
ugugaagcaa

SEQ ID NO: 46632 - RNA, 11 nt, Homo sapiens
ugugaagcaaa

SEQ ID NO: 46633 - RNA, 18 nt, Homo sapiens
ugugaaguuuaauugacu

SEQ ID NO: 46634 - RNA, 21 nt, Homo sapiens
ugugacuuaaugccacuaaau

SEQ ID NO: 46635 - RNA, 22 nt, Homo sapiens
ugugauauguaccuaacgaagu

SEQ ID NO: 46636 - RNA, 12 nt, Homo sapiens
ugugaugaucua

SEQ ID NO: 46637 - RNA, 15 nt, Homo sapiens
ugugauuacaaggcu

SEQ ID NO: 46638 - RNA, 9 nt, Homo sapiens
ugugcaaua

SEQ ID NO: 46639 - RNA, 23 nt, Homo sapiens
ugugcacaucuguuuuguaacug

SEQ ID NO: 46640 - RNA, 15 nt, Homo sapiens
ugugcauauuuuauu

SEQ ID NO: 46641 - RNA, 16 nt, Homo sapiens
ugugcauuuaauuaga

SEQ ID NO: 46642 - RNA, 14 nt, Homo sapiens
ugugccuucauuuu

SEQ ID NO: 46643 - RNA, 11 nt, Homo sapiens
ugugcggccug

SEQ ID NO: 46644 - RNA, 12 nt, Homo sapiens
ugugcggccugg

SEQ ID NO: 46645 - RNA, 14 nt, Homo sapiens
ugugcggccugguc

SEQ ID NO: 46646 - RNA, 21 nt, Homo sapiens
ugugcggccuggucuaccugu

SEQ ID NO: 46647 - RNA, 18 nt, Homo sapiens
ugugcuaguaauuggaaa

SEQ ID NO: 46648 - RNA, 19 nt, Homo sapiens
ugugcuaguaauuggaaag

SEQ ID NO: 46649 - RNA, 15 nt, Homo sapiens
ugugggaaauccaca

SEQ ID NO: 46650 - RNA, 17 nt, Homo sapiens
uguguaagacaaaaagc

SEQ ID NO: 46651 - RNA, 13 nt, Homo sapiens
uguguaaguagau

SEQ ID NO: 46652 - RNA, 16 nt, Homo sapiens
ugugucaguggaugcu

SEQ ID NO: 46653 - RNA, 21 nt, Homo sapiens
ugugucucaggugugcccuga

SEQ ID NO: 46654 - RNA, 16 nt, Homo sapiens
uguguggcauuuucac

SEQ ID NO: 46655 - RNA, 19 nt, Homo sapiens
uguguggucaacauuucuc

SEQ ID NO: 46656 - RNA, 12 nt, Homo sapiens
uguguuacugau

SEQ ID NO: 46657 - RNA, 22 nt, Homo sapiens
uguguuccuaacaggaauuuuc

SEQ ID NO: 46658 - RNA, 17 nt, Homo sapiens
uguguuuauuucacuug

SEQ ID NO: 46659 - RNA, 13 nt, Homo sapiens
uguguuucuuuag

SEQ ID NO: 46660 - RNA, 14 nt, Homo sapiens
uguguuugaagcac

SEQ ID NO: 46661 - RNA, 16 nt, Homo sapiens
uguguuuugcaagcca

SEQ ID NO: 46662 - RNA, 18 nt, Homo sapiens
uguuaaaacugggacagg

SEQ ID NO: 46663 - RNA, 20 nt, Homo sapiens
uguuaauaaaaguacauguu

SEQ ID NO: 46664 - RNA, 15 nt, Homo sapiens
uguuaaucuuucaaa

SEQ ID NO: 46665 - RNA, 14 nt, Homo sapiens
uguuacauuuuuaa

SEQ ID NO: 46666 - RNA, 17 nt, Homo sapiens
uguuacuaaguuuuuau

SEQ ID NO: 46667 - RNA, 19 nt, Homo sapiens
uguuacuaaguuuuuaugg

SEQ ID NO: 46668 - RNA, 19 nt, Homo sapiens
uguuagagaauuuccuuac

SEQ ID NO: 46669 - RNA, 15 nt, Homo sapiens
uguuaucuucacuuu

SEQ ID NO: 46670 - RNA, 17 nt, Homo sapiens
uguuauuuauugaaaug

SEQ ID NO: 46671 - RNA, 18 nt, Homo sapiens
uguuauuuuaucugcuau

SEQ ID NO: 46672 - RNA, 20 nt, Homo sapiens
uguucacagccagacuggca

SEQ ID NO: 46673 - RNA, 13 nt, Homo sapiens
uguuccucgccac

SEQ ID NO: 46674 - RNA, 14 nt, Homo sapiens
uguuccucgccacg

SEQ ID NO: 46675 - RNA, 12 nt, Homo sapiens
uguucgcgcgcc

SEQ ID NO: 46676 - RNA, 17 nt, Homo sapiens
uguucgcgcgccuccgc

SEQ ID NO: 46677 - RNA, 19 nt, Homo sapiens
uguucgcgcgccuccgcua

SEQ ID NO: 46678 - RNA, 16 nt, Homo sapiens
uguucuugguuuguaa

SEQ ID NO: 46679 - RNA, 12 nt, Homo sapiens
uguucuugugaa

SEQ ID NO: 46680 - RNA, 17 nt, Homo sapiens
uguugacaugggacauu

SEQ ID NO: 46681 - RNA, 14 nt, Homo sapiens
uguugccaaggcug

SEQ ID NO: 46682 - RNA, 24 nt, Homo sapiens
uguugccaaggcuggagugcagug

SEQ ID NO: 46683 - RNA, 16 nt, Homo sapiens
uguugcuaucaaucca

SEQ ID NO: 46684 - RNA, 20 nt, Homo sapiens
uguugcuaucaauccaagaa

SEQ ID NO: 46685 - RNA, 18 nt, Homo sapiens
uguugguacuagauacug

SEQ ID NO: 46686 - RNA, 21 nt, Homo sapiens
uguuuaaaaucauuucugcau

SEQ ID NO: 46687 - RNA, 22 nt, Homo sapiens
uguuuacaaaccucaagccagc

SEQ ID NO: 46688 - RNA, 13 nt, Homo sapiens
uguuuauuuguuu

SEQ ID NO: 46689 - RNA, 17 nt, Homo sapiens
uguuuccauagggugac

SEQ ID NO: 46690 - RNA, 19 nt, Homo sapiens
uguuuccuagcacacacuu

SEQ ID NO: 46691 - RNA, 22 nt, Homo sapiens
uguuuccuagcacacacuuuug

SEQ ID NO: 46692 - RNA, 15 nt, Homo sapiens
uguuuuaaggaugcu

SEQ ID NO: 46693 - RNA, 22 nt, Homo sapiens
uguuuuauuuaaccucuaaauu

SEQ ID NO: 46694 - RNA, 22 nt, Homo sapiens
uguuuucauagagaauauaaaa

SEQ ID NO: 46695 - RNA, 21 nt, Homo sapiens
uguuuucugacuaauuaggca

SEQ ID NO: 46696 - RNA, 15 nt, Homo sapiens
uguuuuuaaacugga

SEQ ID NO: 46697 - RNA, 13 nt, Homo sapiens
uguuuuuaagcug

SEQ ID NO: 46698 - RNA, 18 nt, Homo sapiens
uuaaaaaaaaaccugagc

SEQ ID NO: 46699 - RNA, 21 nt, Homo sapiens
uuaaaaaaaaaccugagcccc

SEQ ID NO: 46700 - RNA, 20 nt, Homo sapiens
uuaaaaaaaaauacugaugu

SEQ ID NO: 46701 - RNA, 11 nt, Homo sapiens
uuaaaaucaca

SEQ ID NO: 46702 - RNA, 19 nt, Homo sapiens
uuaaaauuaucaauaucua

SEQ ID NO: 46703 - RNA, 21 nt, Homo sapiens
uuaaacucagggagcauuuau

SEQ ID NO: 46704 - RNA, 20 nt, Homo sapiens
uuaaagcuuauuaaaacuca

SEQ ID NO: 46705 - RNA, 23 nt, Homo sapiens
uuaaauagcuuuuuucucugaua

SEQ ID NO: 46706 - RNA, 18 nt, Homo sapiens
uuaaauggaaguaaaugu

SEQ ID NO: 46707 - RNA, 18 nt, Homo sapiens
uuaaauggagaaaggacc

SEQ ID NO: 46708 - RNA, 19 nt, Homo sapiens
uuaaauggagaaaggaccc

SEQ ID NO: 46709 - RNA, 14 nt, Homo sapiens
uuaacacagugucu

SEQ ID NO: 46710 - RNA, 22 nt, Homo sapiens
uuaacugagaaggcuguggauu

SEQ ID NO: 46711 - RNA, 22 nt, Homo sapiens
uuaagaaucuuuauaguucuac

SEQ ID NO: 46712 - RNA, 18 nt, Homo sapiens
uuaagagagucuauuuac

SEQ ID NO: 46713 - RNA, 16 nt, Homo sapiens
uuaagcuuucagcuca

SEQ ID NO: 46714 - RNA, 19 nt, Homo sapiens
uuaaggauuuuaugcuuua

SEQ ID NO: 46715 - RNA, 20 nt, Homo sapiens
uuaaggauuuuaugcuuuaa

SEQ ID NO: 46716 - RNA, 23 nt, Homo sapiens
uuaaguguaacuggcaguuuucc

SEQ ID NO: 46717 - RNA, 22 nt, Homo sapiens
uuaaguuacacauuuuucagau

SEQ ID NO: 46718 - RNA, 20 nt, Homo sapiens
uuaaguuuuuuuuuaaaaaa

SEQ ID NO: 46719 - RNA, 14 nt, Homo sapiens
uuaauaaaaguaca

SEQ ID NO: 46720 - RNA, 22 nt, Homo sapiens
uuaauaaaccauuuuuacuugg

SEQ ID NO: 46721 - RNA, 11 nt, Homo sapiens
uuaauaucauc

SEQ ID NO: 46722 - RNA, 13 nt, Homo sapiens
uuaauccucucaa

SEQ ID NO: 46723 - RNA, 20 nt, Homo sapiens
uuaauuacuucuuaguaugu

SEQ ID NO: 46724 - RNA, 17 nt, Homo sapiens
uuaauuauuucacuuua

SEQ ID NO: 46725 - RNA, 20 nt, Homo sapiens
uuaauuuauugaggcuuuaa

SEQ ID NO: 46726 - RNA, 20 nt, Homo sapiens
uuaauuugguuuucacauug

SEQ ID NO: 46727 - RNA, 20 nt, Homo sapiens
uuacaaugcauucugaggua

SEQ ID NO: 46728 - RNA, 18 nt, Homo sapiens
uuacagagaaaagacaua

SEQ ID NO: 46729 - RNA, 20 nt, Homo sapiens
uuacaggcgugagccaccaa

SEQ ID NO: 46730 - RNA, 13 nt, Homo sapiens
uuacaucuuucac

SEQ ID NO: 46731 - RNA, 18 nt, Homo sapiens
uuaccacuuguguuuugc

SEQ ID NO: 46732 - RNA, 18 nt, Homo sapiens
uuacccucauguucuuaa

SEQ ID NO: 46733 - RNA, 12 nt, Homo sapiens
uuaccucugaua

SEQ ID NO: 46734 - RNA, 15 nt, Homo sapiens
uuaccugggaaaggg

SEQ ID NO: 46735 - RNA, 20 nt, Homo sapiens
uuacguccuuccacuuccaa

SEQ ID NO: 46736 - RNA, 21 nt, Homo sapiens
uuacuaaacauguauguaaau

SEQ ID NO: 46737 - RNA, 23 nt, Homo sapiens
uuacuauuuauugcugaaugacu

SEQ ID NO: 46738 - RNA, 11 nt, Homo sapiens
uuacucugaag

SEQ ID NO: 46739 - RNA, 13 nt, Homo sapiens
uuacuguacauga

SEQ ID NO: 46740 - RNA, 15 nt, Homo sapiens
uuacuuaguguuaug

SEQ ID NO: 46741 - RNA, 18 nt, Homo sapiens
uuacuucuucucauacua

SEQ ID NO: 46742 - RNA, 20 nt, Homo sapiens
uuagacccucaugcugccaa

SEQ ID NO: 46743 - RNA, 21 nt, Homo sapiens
uuagacccucaugcugccaau

SEQ ID NO: 46744 - RNA, 19 nt, Homo sapiens
uuagcaaaucuacugucaa

SEQ ID NO: 46745 - RNA, 16 nt, Homo sapiens
uuagcagauuuaagau

SEQ ID NO: 46746 - RNA, 10 nt, Homo sapiens
uuagccgggc

SEQ ID NO: 46747 - RNA, 11 nt, Homo sapiens
uuagccgggca

SEQ ID NO: 46748 - RNA, 12 nt, Homo sapiens
uuagccgggcau

SEQ ID NO: 46749 - RNA, 11 nt, Homo sapiens
uuagccgggcg

SEQ ID NO: 46750 - RNA, 13 nt, Homo sapiens
uuagccgggcgug

SEQ ID NO: 46751 - RNA, 18 nt, Homo sapiens
uuagccgggcgugguggu

SEQ ID NO: 46752 - RNA, 12 nt, Homo sapiens
uuagcuggaaaa

SEQ ID NO: 46753 - RNA, 24 nt, Homo sapiens
uuagcuggaaaaguauguuagugc

SEQ ID NO: 46754 - RNA, 21 nt, Homo sapiens
uuaggaguaccauaauucugg

SEQ ID NO: 46755 - RNA, 15 nt, Homo sapiens
uuaggcuauucacaa

SEQ ID NO: 46756 - RNA, 21 nt, Homo sapiens
uuagugcuuugagauugugaa

SEQ ID NO: 46757 - RNA, 14 nt, Homo sapiens
uuaguguacaugaa

SEQ ID NO: 46758 - RNA, 15 nt, Homo sapiens
uuauaaaucgcuuuu

SEQ ID NO: 46759 - RNA, 18 nt, Homo sapiens
uuauaaaucgcuuuugau

SEQ ID NO: 46760 - RNA, 18 nt, Homo sapiens
uuauaauguagcagcuca

SEQ ID NO: 46761 - RNA, 18 nt, Homo sapiens
uuauaauuccuauauccu

SEQ ID NO: 46762 - RNA, 21 nt, Homo sapiens
uuauagaauauuuauuaccuc

SEQ ID NO: 46763 - RNA, 13 nt, Homo sapiens
uuauaugcuauuu

SEQ ID NO: 46764 - RNA, 14 nt, Homo sapiens
uuauauucauucuu

SEQ ID NO: 46765 - RNA, 14 nt, Homo sapiens
uuauauuugaaaua

SEQ ID NO: 46766 - RNA, 16 nt, Homo sapiens
uuauauuugaaauauu

SEQ ID NO: 46767 - RNA, 12 nt, Homo sapiens
uuaucaguccaa

SEQ ID NO: 46768 - RNA, 21 nt, Homo sapiens
uuaucaugcaaaugcuguauu

SEQ ID NO: 46769 - RNA, 10 nt, Homo sapiens
uuaucauuua

SEQ ID NO: 46770 - RNA, 20 nt, Homo sapiens
uuaucugcuaugcuauugaa

SEQ ID NO: 46771 - RNA, 15 nt, Homo sapiens
uuaucuugucucugg

SEQ ID NO: 46772 - RNA, 18 nt, Homo sapiens
uuaugaaacauuacaguu

SEQ ID NO: 46773 - RNA, 16 nt, Homo sapiens
uuaugaaccuuuacau

SEQ ID NO: 46774 - RNA, 20 nt, Homo sapiens
uuaugaaccuuuacauccag

SEQ ID NO: 46775 - RNA, 15 nt, Homo sapiens
uuaugauuaaguaau

SEQ ID NO: 46776 - RNA, 16 nt, Homo sapiens
uuaugcuaagugaaau

SEQ ID NO: 46777 - RNA, 18 nt, Homo sapiens
uuauggcuuuugugcauu

SEQ ID NO: 46778 - RNA, 11 nt, Homo sapiens
uuaugugcaau

SEQ ID NO: 46779 - RNA, 12 nt, Homo sapiens
uuaugugcaaua

SEQ ID NO: 46780 - RNA, 16 nt, Homo sapiens
uuauuacaucuuucac

SEQ ID NO: 46781 - RNA, 12 nt, Homo sapiens
uuauuaccucug

SEQ ID NO: 46782 - RNA, 21 nt, Homo sapiens
uuauuaccucugauaccucaa

SEQ ID NO: 46783 - RNA, 17 nt, Homo sapiens
uuauuauggcacaucag

SEQ ID NO: 46784 - RNA, 13 nt, Homo sapiens
uuauucagaauuu

SEQ ID NO: 46785 - RNA, 14 nt, Homo sapiens
uuauuggacuucca

SEQ ID NO: 46786 - RNA, 14 nt, Homo sapiens
uuauuguaccucuc

SEQ ID NO: 46787 - RNA, 13 nt, Homo sapiens
uuauuguagcauc

SEQ ID NO: 46788 - RNA, 13 nt, Homo sapiens
uuauuucacuuua

SEQ ID NO: 46789 - RNA, 18 nt, Homo sapiens
uuauuuuagagcaucuca

SEQ ID NO: 46790 - RNA, 16 nt, Homo sapiens
uucaaaauuggacuua

SEQ ID NO: 46791 - RNA, 18 nt, Homo sapiens
uucaaacuaauagaauua

SEQ ID NO: 46792 - RNA, 20 nt, Homo sapiens
uucaaaguuaagaaucuuua

SEQ ID NO: 46793 - RNA, 20 nt, Homo sapiens
uucaaauccuugaagauuua

SEQ ID NO: 46794 - RNA, 14 nt, Homo sapiens
uucaaauguauuac

SEQ ID NO: 46795 - RNA, 15 nt, Homo sapiens
uucaaauguucucca

SEQ ID NO: 46796 - RNA, 15 nt, Homo sapiens
uucaagggaccucuc

SEQ ID NO: 46797 - RNA, 17 nt, Homo sapiens
uucaagggaccucucca

SEQ ID NO: 46798 - RNA, 22 nt, Homo sapiens
uucaauaaaacuuuuccaauga

SEQ ID NO: 46799 - RNA, 14 nt, Homo sapiens
uucaauacagauca

SEQ ID NO: 46800 - RNA, 15 nt, Homo sapiens
uucaauccugauuca

SEQ ID NO: 46801 - RNA, 16 nt, Homo sapiens
uucaaucuggauucau

SEQ ID NO: 46802 - RNA, 17 nt, Homo sapiens
uucaaugccccugaauu

SEQ ID NO: 46803 - RNA, 16 nt, Homo sapiens
uucacagauaccucuc

SEQ ID NO: 46804 - RNA, 16 nt, Homo sapiens
uucacagcacuuacaa

SEQ ID NO: 46805 - RNA, 19 nt, Homo sapiens
uucacagccagacuggcac

SEQ ID NO: 46806 - RNA, 20 nt, Homo sapiens
uucaccuuccagugucucgg

SEQ ID NO: 46807 - RNA, 16 nt, Homo sapiens
uucacuuauugacuau

SEQ ID NO: 46808 - RNA, 18 nt, Homo sapiens
uucacuugaugauacaau

SEQ ID NO: 46809 - RNA, 19 nt, Homo sapiens
uucacuuuuauaagaaaua

SEQ ID NO: 46810 - RNA, 17 nt, Homo sapiens
uucagauaacuguuauu

SEQ ID NO: 46811 - RNA, 23 nt, Homo sapiens
uucagauauaaaagacugaccaa

SEQ ID NO: 46812 - RNA, 18 nt, Homo sapiens
uucagcagagaaguuuuc

SEQ ID NO: 46813 - RNA, 16 nt, Homo sapiens
uucagccugaaagagg

SEQ ID NO: 46814 - RNA, 20 nt, Homo sapiens
uucagcucagcuaaugaagu

SEQ ID NO: 46815 - RNA, 15 nt, Homo sapiens
uucaguuuucaggag

SEQ ID NO: 46816 - RNA, 17 nt, Homo sapiens
uucauaccuacauguau

SEQ ID NO: 46817 - RNA, 18 nt, Homo sapiens
uucaucauaauaaauauc

SEQ ID NO: 46818 - RNA, 21 nt, Homo sapiens
uucaugaaaagauuaugaucu

SEQ ID NO: 46819 - RNA, 17 nt, Homo sapiens
uucaugaaggggcggcg

SEQ ID NO: 46820 - RNA, 22 nt, Homo sapiens
uucaugaaggggcggcggcccu

SEQ ID NO: 46821 - RNA, 18 nt, Homo sapiens
uucaugcuguucaugaaa

SEQ ID NO: 46822 - RNA, 21 nt, Homo sapiens
uucauuaucucaaaacugcac

SEQ ID NO: 46823 - RNA, 19 nt, Homo sapiens
uucauucuuuuugaaaugu

SEQ ID NO: 46824 - RNA, 13 nt, Homo sapiens
uucauuguucuau

SEQ ID NO: 46825 - RNA, 17 nt, Homo sapiens
uuccaagaaauauuccu

SEQ ID NO: 46826 - RNA, 14 nt, Homo sapiens
uuccaaugacauuu

SEQ ID NO: 46827 - RNA, 14 nt, Homo sapiens
uuccacuacugcua

SEQ ID NO: 46828 - RNA, 19 nt, Homo sapiens
uuccagagaccaguauucc

SEQ ID NO: 46829 - RNA, 14 nt, Homo sapiens
uuccagauccugga

SEQ ID NO: 46830 - RNA, 17 nt, Homo sapiens
uuccagggcuacgcgcg

SEQ ID NO: 46831 - RNA, 20 nt, Homo sapiens
uuccagggcuacgcgcgcuc

SEQ ID NO: 46832 - RNA, 18 nt, Homo sapiens
uuccaguaguuagcuuuc

SEQ ID NO: 46833 - RNA, 17 nt, Homo sapiens
uuccaucaaggguacac

SEQ ID NO: 46834 - RNA, 14 nt, Homo sapiens
uucccaaaacugau

SEQ ID NO: 46835 - RNA, 18 nt, Homo sapiens
uucccaaauuucauaccu

SEQ ID NO: 46836 - RNA, 13 nt, Homo sapiens
uucccacacuguc

SEQ ID NO: 46837 - RNA, 15 nt, Homo sapiens
uucccacacugucca

SEQ ID NO: 46838 - RNA, 20 nt, Homo sapiens
uucccagcuagaauucacuc

SEQ ID NO: 46839 - RNA, 22 nt, Homo sapiens
uucccagucuucagcagagaag

SEQ ID NO: 46840 - RNA, 17 nt, Homo sapiens
uucccauucuacauacu

SEQ ID NO: 46841 - RNA, 18 nt, Homo sapiens
uucccgcuguuccucgcc

SEQ ID NO: 46842 - RNA, 15 nt, Homo sapiens
uucccugccuggauc

SEQ ID NO: 46843 - RNA, 18 nt, Homo sapiens
uucccuugaugaagaagu

SEQ ID NO: 46844 - RNA, 12 nt, Homo sapiens
uuccgcauccua

SEQ ID NO: 46845 - RNA, 16 nt, Homo sapiens
uuccgcauccuagucu

SEQ ID NO: 46846 - RNA, 13 nt, Homo sapiens
uuccuagcgcagc

SEQ ID NO: 46847 - RNA, 21 nt, Homo sapiens
uuccuauaauuuuagacauuc

SEQ ID NO: 46848 - RNA, 17 nt, Homo sapiens
uuccucaaaacuucaga

SEQ ID NO: 46849 - RNA, 15 nt, Homo sapiens
uuccucacuuugaag

SEQ ID NO: 46850 - RNA, 18 nt, Homo sapiens
uuccucacuuugaagagu

SEQ ID NO: 46851 - RNA, 12 nt, Homo sapiens
uuccucccggcc

SEQ ID NO: 46852 - RNA, 14 nt, Homo sapiens
uuccucccggccgc

SEQ ID NO: 46853 - RNA, 16 nt, Homo sapiens
uuccucccggccgcgc

SEQ ID NO: 46854 - RNA, 13 nt, Homo sapiens
uuccucgccacgc

SEQ ID NO: 46855 - RNA, 14 nt, Homo sapiens
uuccugagaccagc

SEQ ID NO: 46856 - RNA, 15 nt, Homo sapiens
uuccugagaccagcc

SEQ ID NO: 46857 - RNA, 21 nt, Homo sapiens
uuccugagaccagccaaccug

SEQ ID NO: 46858 - RNA, 11 nt, Homo sapiens
uuccugcaaug

SEQ ID NO: 46859 - RNA, 21 nt, Homo sapiens
uuccugcaaugaagucucuga

SEQ ID NO: 46860 - RNA, 16 nt, Homo sapiens
uuccugggagcuuuug

SEQ ID NO: 46861 - RNA, 19 nt, Homo sapiens
uuccuuauucagaauuucu

SEQ ID NO: 46862 - RNA, 13 nt, Homo sapiens
uucgcgcgccucc

SEQ ID NO: 46863 - RNA, 15 nt, Homo sapiens
uucgcgcgccuccgc

SEQ ID NO: 46864 - RNA, 16 nt, Homo sapiens
uucuaaaggcuaccuu

SEQ ID NO: 46865 - RNA, 15 nt, Homo sapiens
uucuaggacugaauu

SEQ ID NO: 46866 - RNA, 14 nt, Homo sapiens
uucuagggaaauga

SEQ ID NO: 46867 - RNA, 13 nt, Homo sapiens
uucuaugaaauau

SEQ ID NO: 46868 - RNA, 17 nt, Homo sapiens
uucuauggcauauugau

SEQ ID NO: 46869 - RNA, 14 nt, Homo sapiens
uucuauguuaauau

SEQ ID NO: 46870 - RNA, 17 nt, Homo sapiens
uucuauuacgugcaaua

SEQ ID NO: 46871 - RNA, 22 nt, Homo sapiens
uucuauuacgugcaauacuuca

SEQ ID NO: 46872 - RNA, 15 nt, Homo sapiens
uucuauuuauuuacu

SEQ ID NO: 46873 - RNA, 16 nt, Homo sapiens
uucucaccugugagac

SEQ ID NO: 46874 - RNA, 16 nt, Homo sapiens
uucucuaacucagaaa

SEQ ID NO: 46875 - RNA, 22 nt, Homo sapiens
uucucuagucauuuguuaauau

SEQ ID NO: 46876 - RNA, 22 nt, Homo sapiens
uucucuucacagucacauucca

SEQ ID NO: 46877 - RNA, 16 nt, Homo sapiens
uucugagguaaccuca

SEQ ID NO: 46878 - RNA, 22 nt, Homo sapiens
uucugcagauaaacaguaguga

SEQ ID NO: 46879 - RNA, 19 nt, Homo sapiens
uucugucacggucacuuua

SEQ ID NO: 46880 - RNA, 20 nt, Homo sapiens
uucugucuggacuuuccaga

SEQ ID NO: 46881 - RNA, 22 nt, Homo sapiens
uucugugggagaauucuuacau

SEQ ID NO: 46882 - RNA, 15 nt, Homo sapiens
uucuguuuuauaauu

SEQ ID NO: 46883 - RNA, 21 nt, Homo sapiens
uucuuaaauaauaaagaucau

SEQ ID NO: 46884 - RNA, 19 nt, Homo sapiens
uucuuaagacgugauuuug

SEQ ID NO: 46885 - RNA, 21 nt, Homo sapiens
uucuucuuggucucaguguca

SEQ ID NO: 46886 - RNA, 15 nt, Homo sapiens
uucuugcaaaguauc

SEQ ID NO: 46887 - RNA, 15 nt, Homo sapiens
uucuuguaaggcaua

SEQ ID NO: 46888 - RNA, 16 nt, Homo sapiens
uucuuguacucuacaa

SEQ ID NO: 46889 - RNA, 18 nt, Homo sapiens
uucuuuuugaaaugucaa

SEQ ID NO: 46890 - RNA, 13 nt, Homo sapiens
uugaaaaaguaua

SEQ ID NO: 46891 - RNA, 17 nt, Homo sapiens
uugaaaagacuccaaag

SEQ ID NO: 46892 - RNA, 15 nt, Homo sapiens
uugaaacugagaugu

SEQ ID NO: 46893 - RNA, 15 nt, Homo sapiens
uugaaauagugucug

SEQ ID NO: 46894 - RNA, 17 nt, Homo sapiens
uugaaaugauuucacag

SEQ ID NO: 46895 - RNA, 12 nt, Homo sapiens
uugaaaugucaa

SEQ ID NO: 46896 - RNA, 14 nt, Homo sapiens
uugaagagguuuua

SEQ ID NO: 46897 - RNA, 21 nt, Homo sapiens
uugaagaugcuuguauuuuac

SEQ ID NO: 46898 - RNA, 14 nt, Homo sapiens
uugaaugugucagg

SEQ ID NO: 46899 - RNA, 20 nt, Homo sapiens
uugacccacaagaaaugaaa

SEQ ID NO: 46900 - RNA, 20 nt, Homo sapiens
uugacuauuauagaauggaa

SEQ ID NO: 46901 - RNA, 20 nt, Homo sapiens
uugagaaauuaaguaucuga

SEQ ID NO: 46902 - RNA, 12 nt, Homo sapiens
uugagcaccugc

SEQ ID NO: 46903 - RNA, 17 nt, Homo sapiens
uugagcuagggggguca

SEQ ID NO: 46904 - RNA, 23 nt, Homo sapiens
uugagcuaggggggucagccagc

SEQ ID NO: 46905 - RNA, 21 nt, Homo sapiens
uugaugaagaaguugauaugc

SEQ ID NO: 46906 - RNA, 19 nt, Homo sapiens
uugaugauuaauucaccuu

SEQ ID NO: 46907 - RNA, 18 nt, Homo sapiens
uugauggugguauguuuu

SEQ ID NO: 46908 - RNA, 15 nt, Homo sapiens
uugauguuuucacaa

SEQ ID NO: 46909 - RNA, 12 nt, Homo sapiens
uugcaaccccau

SEQ ID NO: 46910 - RNA, 15 nt, Homo sapiens
uugcaagacauagaa

SEQ ID NO: 46911 - RNA, 23 nt, Homo sapiens
uugcauuuaauuuauugaggcuu

SEQ ID NO: 46912 - RNA, 21 nt, Homo sapiens
uugccaaggcuggagugcagu

SEQ ID NO: 46913 - RNA, 21 nt, Homo sapiens
uugccaugagaguucugucac

SEQ ID NO: 46914 - RNA, 20 nt, Homo sapiens
uugccaugcuggccaggcug

SEQ ID NO: 46915 - RNA, 15 nt, Homo sapiens
uugccucuugcaauu

SEQ ID NO: 46916 - RNA, 17 nt, Homo sapiens
uugcuaucaauccaaga

SEQ ID NO: 46917 - RNA, 13 nt, Homo sapiens
uugcugcaccugu

SEQ ID NO: 46918 - RNA, 17 nt, Homo sapiens
uugcugcaccugugccg

SEQ ID NO: 46919 - RNA, 15 nt, Homo sapiens
uugcuggagcucugc

SEQ ID NO: 46920 - RNA, 17 nt, Homo sapiens
uugcuggagcucugccc

SEQ ID NO: 46921 - RNA, 11 nt, Homo sapiens
uugcuguagaa

SEQ ID NO: 46922 - RNA, 15 nt, Homo sapiens
uugcuugaacccagg

SEQ ID NO: 46923 - RNA, 17 nt, Homo sapiens
uugcuuuucaacacaca

SEQ ID NO: 46924 - RNA, 15 nt, Homo sapiens
uuggaagguauuuaa

SEQ ID NO: 46925 - RNA, 12 nt, Homo sapiens
uuggagaagaac

SEQ ID NO: 46926 - RNA, 18 nt, Homo sapiens
uuggcccaggaguuuggc

SEQ ID NO: 46927 - RNA, 22 nt, Homo sapiens
uuggcccaggaguuuggccaga

SEQ ID NO: 46928 - RNA, 14 nt, Homo sapiens
uugggaggcugagg

SEQ ID NO: 46929 - RNA, 15 nt, Homo sapiens
uugggaggcugaggc

SEQ ID NO: 46930 - RNA, 22 nt, Homo sapiens
uugggaggcugaggcaagagaa

SEQ ID NO: 46931 - RNA, 22 nt, Homo sapiens
uugggggggaggugagguacca

SEQ ID NO: 46932 - RNA, 21 nt, Homo sapiens
uugguacuagauacugaaugu

SEQ ID NO: 46933 - RNA, 17 nt, Homo sapiens
uuggugccucaguuucc

SEQ ID NO: 46934 - RNA, 20 nt, Homo sapiens
uugguucuaauagaacucag

SEQ ID NO: 46935 - RNA, 18 nt, Homo sapiens
uuguacaccaauauucau

SEQ ID NO: 46936 - RNA, 17 nt, Homo sapiens
uuguaccgcaaugugac

SEQ ID NO: 46937 - RNA, 16 nt, Homo sapiens
uuguagcguacaucaa

SEQ ID NO: 46938 - RNA, 19 nt, Homo sapiens
uuguauucucuccuguacc

SEQ ID NO: 46939 - RNA, 12 nt, Homo sapiens
uugugcauuugg

SEQ ID NO: 46940 - RNA, 21 nt, Homo sapiens
uuguguaaugaaaaugaauau

SEQ ID NO: 46941 - RNA, 16 nt, Homo sapiens
uuguguuugaagcaca

SEQ ID NO: 46942 - RNA, 13 nt, Homo sapiens
uuguucuugugaa

SEQ ID NO: 46943 - RNA, 16 nt, Homo sapiens
uuguuuaaaaucauuu

SEQ ID NO: 46944 - RNA, 22 nt, Homo sapiens
uuguuugagaaauuaaguaucu

SEQ ID NO: 46945 - RNA, 19 nt, Homo sapiens
uuguuugcauaggugaucu

SEQ ID NO: 46946 - RNA, 21 nt, Homo sapiens
uuguuuuaaaauuaaagcuaa

SEQ ID NO: 46947 - RNA, 14 nt, Homo sapiens
uuguuuucauuauc

SEQ ID NO: 46948 - RNA, 16 nt, Homo sapiens
uuguuuuuaaacugga

SEQ ID NO: 46949 - RNA, 23 nt, Homo sapiens
uuuaaaaaaaaaaaaaaagccaa

SEQ ID NO: 46950 - RNA, 17 nt, Homo sapiens
uuuaaaaaaaaaacgua

SEQ ID NO: 46951 - RNA, 21 nt, Homo sapiens
uuuaaaaaaaaaccugagccc

SEQ ID NO: 46952 - RNA, 18 nt, Homo sapiens
uuuaaaauacacacucaa

SEQ ID NO: 46953 - RNA, 21 nt, Homo sapiens
uuuaaagcuuauuaaaacuca

SEQ ID NO: 46954 - RNA, 13 nt, Homo sapiens
uuuaaagggaugg

SEQ ID NO: 46955 - RNA, 16 nt, Homo sapiens
uuuaaaugcaccugga

SEQ ID NO: 46956 - RNA, 19 nt, Homo sapiens
uuuaaauuaaauaaaauuu

SEQ ID NO: 46957 - RNA, 20 nt, Homo sapiens
uuuaaauuaaauaaaauuuu

SEQ ID NO: 46958 - RNA, 21 nt, Homo sapiens
uuuaacuagaauuuauucaau

SEQ ID NO: 46959 - RNA, 14 nt, Homo sapiens
uuuaaguaauuuca

SEQ ID NO: 46960 - RNA, 18 nt, Homo sapiens
uuuaauagguuuggacaa

SEQ ID NO: 46961 - RNA, 19 nt, Homo sapiens
uuuaauagguuuggacaaa

SEQ ID NO: 46962 - RNA, 16 nt, Homo sapiens
uuuaaucaccaaggcu

SEQ ID NO: 46963 - RNA, 17 nt, Homo sapiens
uuuaauggcaugucaga

SEQ ID NO: 46964 - RNA, 17 nt, Homo sapiens
uuuaauuugguuuucac

SEQ ID NO: 46965 - RNA, 12 nt, Homo sapiens
uuuacaacuggg

SEQ ID NO: 46966 - RNA, 11 nt, Homo sapiens
uuuacaguguu

SEQ ID NO: 46967 - RNA, 21 nt, Homo sapiens
uuuacauacugcugucuaugu

SEQ ID NO: 46968 - RNA, 11 nt, Homo sapiens
uuuacuuuguu

SEQ ID NO: 46969 - RNA, 18 nt, Homo sapiens
uuuagaagauucuauguu

SEQ ID NO: 46970 - RNA, 15 nt, Homo sapiens
uuuagaugaauguca

SEQ ID NO: 46971 - RNA, 13 nt, Homo sapiens
uuuagcuggaaaa

SEQ ID NO: 46972 - RNA, 15 nt, Homo sapiens
uuuagggaccugcug

SEQ ID NO: 46973 - RNA, 16 nt, Homo sapiens
uuuauaaauggacaaa

SEQ ID NO: 46974 - RNA, 13 nt, Homo sapiens
uuuauaugcuauu

SEQ ID NO: 46975 - RNA, 17 nt, Homo sapiens
uuuaucuugucucuggg

SEQ ID NO: 46976 - RNA, 14 nt, Homo sapiens
uuuaugauuccacc

SEQ ID NO: 46977 - RNA, 15 nt, Homo sapiens
uuuaugcuaagugaa

SEQ ID NO: 46978 - RNA, 13 nt, Homo sapiens
uuuauguaauuau

SEQ ID NO: 46979 - RNA, 11 nt, Homo sapiens
uuuaugugcaa

SEQ ID NO: 46980 - RNA, 13 nt, Homo sapiens
uuuaugugcaaua

SEQ ID NO: 46981 - RNA, 13 nt, Homo sapiens
uuuauuaccucug

SEQ ID NO: 46982 - RNA, 13 nt, Homo sapiens
uuuauuauauaua

SEQ ID NO: 46983 - RNA, 13 nt, Homo sapiens
uuuauugccauga

SEQ ID NO: 46984 - RNA, 24 nt, Homo sapiens
uuucaaaaucaaauuccagaauga

SEQ ID NO: 46985 - RNA, 12 nt, Homo sapiens
uuucaaacuuua

SEQ ID NO: 46986 - RNA, 21 nt, Homo sapiens
uuucaccuguuuuuaagcugu

SEQ ID NO: 46987 - RNA, 20 nt, Homo sapiens
uuucacuuuuggcuuguaaa

SEQ ID NO: 46988 - RNA, 17 nt, Homo sapiens
uuucagugcacuaaugu

SEQ ID NO: 46989 - RNA, 20 nt, Homo sapiens
uuucauaagaauucuguuga

SEQ ID NO: 46990 - RNA, 19 nt, Homo sapiens
uuucauaccuaucaucuua

SEQ ID NO: 46991 - RNA, 22 nt, Homo sapiens
uuucaugaaaagauuaugaucu

SEQ ID NO: 46992 - RNA, 16 nt, Homo sapiens
uuucaugaaggggcgg

SEQ ID NO: 46993 - RNA, 19 nt, Homo sapiens
uuucaugaaggggcggcgg

SEQ ID NO: 46994 - RNA, 18 nt, Homo sapiens
uuucaugcuguucaugaa

SEQ ID NO: 46995 - RNA, 23 nt, Homo sapiens
uuucauuuuagggguagcauuug

SEQ ID NO: 46996 - RNA, 15 nt, Homo sapiens
uuuccaaauucacaa

SEQ ID NO: 46997 - RNA, 18 nt, Homo sapiens
uuuccacuacugcuacca

SEQ ID NO: 46998 - RNA, 21 nt, Homo sapiens
uuuccagguuccugagcccua

SEQ ID NO: 46999 - RNA, 14 nt, Homo sapiens
uuucccaacuccag

SEQ ID NO: 47000 - RNA, 19 nt, Homo sapiens
uuucccuucuuacaaugca

SEQ ID NO: 47001 - RNA, 16 nt, Homo sapiens
uuucuaggacugaauu

SEQ ID NO: 47002 - RNA, 10 nt, Homo sapiens
uuucugaaau

SEQ ID NO: 47003 - RNA, 14 nt, Homo sapiens
uuucugagaaagac

SEQ ID NO: 47004 - RNA, 18 nt, Homo sapiens
uuucuggaggucucugaa

SEQ ID NO: 47005 - RNA, 21 nt, Homo sapiens
uuucuuccuuuuuuaguucuu

SEQ ID NO: 47006 - RNA, 17 nt, Homo sapiens
uuugaaaccaaaccaga

SEQ ID NO: 47007 - RNA, 22 nt, Homo sapiens
uuugaacaacucgaaucacuca

SEQ ID NO: 47008 - RNA, 22 nt, Homo sapiens
uuugaacuagaguuuagcugga

SEQ ID NO: 47009 - RNA, 16 nt, Homo sapiens
uuugaagagugugagg

SEQ ID NO: 47010 - RNA, 16 nt, Homo sapiens
uuugaagauagaaggu

SEQ ID NO: 47011 - RNA, 18 nt, Homo sapiens
uuugaagguagaauguuu

SEQ ID NO: 47012 - RNA, 15 nt, Homo sapiens
uuugaauuuuaaauc

SEQ ID NO: 47013 - RNA, 18 nt, Homo sapiens
uuugagaaauuaaguauc

SEQ ID NO: 47014 - RNA, 14 nt, Homo sapiens
uuugagcucuggaa

SEQ ID NO: 47015 - RNA, 13 nt, Homo sapiens
uuugauguuuuaa

SEQ ID NO: 47016 - RNA, 13 nt, Homo sapiens
uuugcaagacaua

SEQ ID NO: 47017 - RNA, 20 nt, Homo sapiens
uuugcagauauucucuaguc

SEQ ID NO: 47018 - RNA, 17 nt, Homo sapiens
uuugcagcugugccaua

SEQ ID NO: 47019 - RNA, 21 nt, Homo sapiens
uuugccaugcuggccaggcug

SEQ ID NO: 47020 - RNA, 16 nt, Homo sapiens
uuugcuaagcauucca

SEQ ID NO: 47021 - RNA, 19 nt, Homo sapiens
uuugcuaagcauuccaacu

SEQ ID NO: 47022 - RNA, 23 nt, Homo sapiens
uuugcuaagcauuccaacuaucu

SEQ ID NO: 47023 - RNA, 19 nt, Homo sapiens
uuugcucauggaauuggag

SEQ ID NO: 47024 - RNA, 11 nt, Homo sapiens
uuugcuguaga

SEQ ID NO: 47025 - RNA, 12 nt, Homo sapiens
uuugcuguagaa

SEQ ID NO: 47026 - RNA, 17 nt, Homo sapiens
uuugguucuaggccggg

SEQ ID NO: 47027 - RNA, 13 nt, Homo sapiens
uuugguugcuuua

SEQ ID NO: 47028 - RNA, 18 nt, Homo sapiens
uuugguugcuuuaauauc

SEQ ID NO: 47029 - RNA, 22 nt, Homo sapiens
uuuguagaagucacauuccuga

SEQ ID NO: 47030 - RNA, 19 nt, Homo sapiens
uuuguagccacuucacuuu

SEQ ID NO: 47031 - RNA, 22 nt, Homo sapiens
uuugugaagcaaaauuuuuucu

SEQ ID NO: 47032 - RNA, 16 nt, Homo sapiens
uuugugacuuuccuaa

SEQ ID NO: 47033 - RNA, 14 nt, Homo sapiens
uuugugauugccau

SEQ ID NO: 47034 - RNA, 17 nt, Homo sapiens
uuugugggaaauccaca

SEQ ID NO: 47035 - RNA, 18 nt, Homo sapiens
uuuguuauuuuuccccaa

SEQ ID NO: 47036 - RNA, 19 nt, Homo sapiens
uuuuaagaaaaaggaugca

SEQ ID NO: 47037 - RNA, 21 nt, Homo sapiens
uuuuaagaaaaaggaugcaca

SEQ ID NO: 47038 - RNA, 14 nt, Homo sapiens
uuuuaaggcauauu

SEQ ID NO: 47039 - RNA, 23 nt, Homo sapiens
uuuuaaggcauauuuaacaaaau

SEQ ID NO: 47040 - RNA, 15 nt, Homo sapiens
uuuuaaguaauuuca

SEQ ID NO: 47041 - RNA, 21 nt, Homo sapiens
uuuuagaagauucuauguuaa

SEQ ID NO: 47042 - RNA, 20 nt, Homo sapiens
uuuuagucuaauugaauccc

SEQ ID NO: 47043 - RNA, 20 nt, Homo sapiens
uuuuauggaggcuuugcaua

SEQ ID NO: 47044 - RNA, 19 nt, Homo sapiens
uuuucacaaagaacaggaa

SEQ ID NO: 47045 - RNA, 20 nt, Homo sapiens
uuuucacaaagaacaggaaa

SEQ ID NO: 47046 - RNA, 14 nt, Homo sapiens
uuuucauuaucuca

SEQ ID NO: 47047 - RNA, 15 nt, Homo sapiens
uuuucccucuucacu

SEQ ID NO: 47048 - RNA, 13 nt, Homo sapiens
uuuuccuucucau

SEQ ID NO: 47049 - RNA, 23 nt, Homo sapiens
uuuucucaauguuuagcagauuu

SEQ ID NO: 47050 - RNA, 20 nt, Homo sapiens
uuuugaagauucuauguuaa

SEQ ID NO: 47051 - RNA, 21 nt, Homo sapiens
uuuugguugcuuuaauaucau

SEQ ID NO: 47052 - RNA, 21 nt, Homo sapiens
uuuuuaaacaaaaaaagcauu

SEQ ID NO: 47053 - RNA, 20 nt, Homo sapiens
uuuuuauggaggcuuugcau

SEQ ID NO: 47054 - RNA, 16 nt, Homo sapiens
uuuuuaugugcaauaa

SEQ ID NO: 47055 - RNA, 13 nt, Homo sapiens
uuuuucauuauug

SEQ ID NO: 47056 - RNA, 11 nt, Homo sapiens
uuuuuuaaaaa

SEQ ID NO: 47057 - RNA, 12 nt, Homo sapiens
uuuuuuaaaaaa

SEQ ID NO: 47058 - RNA, 13 nt, Homo sapiens
aauuggagcucgu

SEQ ID NO: 47059 - RNA, 14 nt, Homo sapiens
aauuggagcucgug

SEQ ID NO: 47060 - RNA, 18 nt, Homo sapiens
aauuuaaacgugauuuuu

SEQ ID NO: 47061 - RNA, 15 nt, Homo sapiens
aauuuaaauagcuuu

SEQ ID NO: 47062 - RNA, 15 nt, Homo sapiens
aauuuaguauuuugu

SEQ ID NO: 47063 - RNA, 20 nt, Homo sapiens
aauuuaucuugucucugggc

SEQ ID NO: 47064 - RNA, 19 nt, Homo sapiens
aauuucauaccuaucaucu

SEQ ID NO: 47065 - RNA, 21 nt, Homo sapiens
aauuucauaccuaucaucuua

SEQ ID NO: 47066 - RNA, 19 nt, Homo sapiens
aauuuccugggagcuuuug

SEQ ID NO: 47067 - RNA, 10 nt, Homo sapiens
aauuuccuua

SEQ ID NO: 47068 - RNA, 18 nt, Homo sapiens
aauuuccuuacucuugau

SEQ ID NO: 47069 - RNA, 16 nt, Homo sapiens
aauuucuaggacugaa

SEQ ID NO: 47070 - RNA, 15 nt, Homo sapiens
aauuucucccaguca

SEQ ID NO: 47071 - RNA, 20 nt, Homo sapiens
aauuucucccagucauuuaa

SEQ ID NO: 47072 - RNA, 23 nt, Homo sapiens
aauuugguuuucacauuggaaac

SEQ ID NO: 47073 - RNA, 19 nt, Homo sapiens
aauuuuaaggcauauuuaa

SEQ ID NO: 47074 - RNA, 14 nt, Homo sapiens
aauuuuaguuguca

SEQ ID NO: 47075 - RNA, 21 nt, Homo sapiens
aauuuucaaaaucaaauucca

SEQ ID NO: 47076 - RNA, 20 nt, Homo sapiens
aauuuucuucuugguucuga

SEQ ID NO: 47077 - RNA, 17 nt, Homo sapiens
aauuuuuauauuugaaa

SEQ ID NO: 47078 - RNA, 21 nt, Homo sapiens
aauuuuucucuaacucagaaa

SEQ ID NO: 47079 - RNA, 19 nt, Homo sapiens
aauuuuuucucuaggaaau

SEQ ID NO: 47080 - RNA, 21 nt, Homo sapiens
acaaaaaaagcauuguaacuu

SEQ ID NO: 47081 - RNA, 13 nt, Homo sapiens
acaaaaacacagc

SEQ ID NO: 47082 - RNA, 15 nt, Homo sapiens
acaaaaagcuacuua

SEQ ID NO: 47083 - RNA, 17 nt, Homo sapiens
acaaaaauuagccgggc

SEQ ID NO: 47084 - RNA, 18 nt, Homo sapiens
acaaaaauuagccgggca

SEQ ID NO: 47085 - RNA, 20 nt, Homo sapiens
acaaaauggaauacucuuau

SEQ ID NO: 47086 - RNA, 17 nt, Homo sapiens
acaaaccucaagccagc

SEQ ID NO: 47087 - RNA, 13 nt, Homo sapiens
acaaacucaucca

SEQ ID NO: 47088 - RNA, 12 nt, Homo sapiens
acaaagacaaau

SEQ ID NO: 47089 - RNA, 19 nt, Homo sapiens
acaaauuuacagagacaga

SEQ ID NO: 47090 - RNA, 12 nt, Homo sapiens
acaacaaaagcg

SEQ ID NO: 47091 - RNA, 22 nt, Homo sapiens
acaacaauuauuugaagauuua

SEQ ID NO: 47092 - RNA, 20 nt, Homo sapiens
acaaccuaaauuugguucua

SEQ ID NO: 47093 - RNA, 15 nt, Homo sapiens
acaacucgaaucacu

SEQ ID NO: 47094 - RNA, 16 nt, Homo sapiens
acaacucgaaucacuc

SEQ ID NO: 47095 - RNA, 12 nt, Homo sapiens
acaacugugacu

SEQ ID NO: 47096 - RNA, 13 nt, Homo sapiens
acaacugugacug

SEQ ID NO: 47097 - RNA, 22 nt, Homo sapiens
acaagaaaugaaagcagggacu

SEQ ID NO: 47098 - RNA, 23 nt, Homo sapiens
acaagaaaugaaagcagggacuu

SEQ ID NO: 47099 - RNA, 19 nt, Homo sapiens
acaagacccaaaaggcaga

SEQ ID NO: 47100 - RNA, 22 nt, Homo sapiens
acaagcaggcucaacauaacau

SEQ ID NO: 47101 - RNA, 21 nt, Homo sapiens
acaaggaugaauuaaguuuuu

SEQ ID NO: 47102 - RNA, 18 nt, Homo sapiens
acaaggcuuuaucucagg

SEQ ID NO: 47103 - RNA, 18 nt, Homo sapiens
acaauuauaucaguccuc

SEQ ID NO: 47104 - RNA, 20 nt, Homo sapiens
acaauuauuugaagauuuaa

SEQ ID NO: 47105 - RNA, 16 nt, Homo sapiens
acacacucaaaucaag

SEQ ID NO: 47106 - RNA, 15 nt, Homo sapiens
acacacugaagaagc

SEQ ID NO: 47107 - RNA, 22 nt, Homo sapiens
acacagcaagggugaugggaaa

SEQ ID NO: 47108 - RNA, 13 nt, Homo sapiens
acacagugucugg

SEQ ID NO: 47109 - RNA, 14 nt, Homo sapiens
acacaugauccugc

SEQ ID NO: 47110 - RNA, 15 nt, Homo sapiens
acacaugauccugca

SEQ ID NO: 47111 - RNA, 23 nt, Homo sapiens
acaccaauauucauagcagcuua

SEQ ID NO: 47112 - RNA, 20 nt, Homo sapiens
acaccaccacccuugccaug

SEQ ID NO: 47113 - RNA, 13 nt, Homo sapiens
acaccaggauuua

SEQ ID NO: 47114 - RNA, 18 nt, Homo sapiens
acaccaggauuuaaguuu

SEQ ID NO: 47115 - RNA, 19 nt, Homo sapiens
acaccagggccuggcuggg

SEQ ID NO: 47116 - RNA, 23 nt, Homo sapiens
acaccauuccuucugcccugcuu

SEQ ID NO: 47117 - RNA, 14 nt, Homo sapiens
acaccucagcugcc

SEQ ID NO: 47118 - RNA, 18 nt, Homo sapiens
acaccucagcugccuccc

SEQ ID NO: 47119 - RNA, 19 nt, Homo sapiens
acaccucagcugccucccc

SEQ ID NO: 47120 - RNA, 12 nt, Homo sapiens
acacgagcaggc

SEQ ID NO: 47121 - RNA, 20 nt, Homo sapiens
acacgagcaggcuacuguca

SEQ ID NO: 47122 - RNA, 18 nt, Homo sapiens
acacuaaaaaggcaugua

SEQ ID NO: 47123 - RNA, 16 nt, Homo sapiens
acacuaaaacaccuca

SEQ ID NO: 47124 - RNA, 20 nt, Homo sapiens
acacuaaaacaccucagcug

SEQ ID NO: 47125 - RNA, 16 nt, Homo sapiens
acacucaaaucaagaa

SEQ ID NO: 47126 - RNA, 20 nt, Homo sapiens
acacuccaauuaaggauuuu

SEQ ID NO: 47127 - RNA, 16 nt, Homo sapiens
acacugaagaagcacc

SEQ ID NO: 47128 - RNA, 19 nt, Homo sapiens
acacugcauguuugugauu

SEQ ID NO: 47129 - RNA, 9 nt, Homo sapiens
acacugucc

SEQ ID NO: 47130 - RNA, 17 nt, Homo sapiens
acacuguccuauuauau

SEQ ID NO: 47131 - RNA, 16 nt, Homo sapiens
acacuguuaucuucac

SEQ ID NO: 47132 - RNA, 19 nt, Homo sapiens
acacuguuaucuucacuuu

SEQ ID NO: 47133 - RNA, 13 nt, Homo sapiens
acacuguuucaaa

SEQ ID NO: 47134 - RNA, 14 nt, Homo sapiens
acacuuauaaguga

SEQ ID NO: 47135 - RNA, 13 nt, Homo sapiens
acagaacuaugga

SEQ ID NO: 47136 - RNA, 23 nt, Homo sapiens
acagaagagugacauguuuacaa

SEQ ID NO: 47137 - RNA, 11 nt, Homo sapiens
acagaagcucc

SEQ ID NO: 47138 - RNA, 13 nt, Homo sapiens
acagaagcuccag

SEQ ID NO: 47139 - RNA, 21 nt, Homo sapiens
acagacuuuuuuuuuuuuuua

SEQ ID NO: 47140 - RNA, 17 nt, Homo sapiens
acagagaaaagacauaa

SEQ ID NO: 47141 - RNA, 10 nt, Homo sapiens
acagagacag

SEQ ID NO: 47142 - RNA, 11 nt, Homo sapiens
acagagacaga

SEQ ID NO: 47143 - RNA, 13 nt, Homo sapiens
acagaggaucugc

SEQ ID NO: 47144 - RNA, 15 nt, Homo sapiens
acagaggaucugcuu

SEQ ID NO: 47145 - RNA, 13 nt, Homo sapiens
acagauaccucuc

SEQ ID NO: 47146 - RNA, 20 nt, Homo sapiens
acagccagacuggcacaguu

SEQ ID NO: 47147 - RNA, 19 nt, Homo sapiens
acagccaggcggcuggaau

SEQ ID NO: 47148 - RNA, 18 nt, Homo sapiens
acagcccaagggugggug

SEQ ID NO: 47149 - RNA, 16 nt, Homo sapiens
acagccucuuagaugc

SEQ ID NO: 47150 - RNA, 17 nt, Homo sapiens
acagccucuuagaugca

SEQ ID NO: 47151 - RNA, 17 nt, Homo sapiens
acagcuccaccuuacuu

SEQ ID NO: 47152 - RNA, 11 nt, Homo sapiens
acagcucugca

SEQ ID NO: 47153 - RNA, 21 nt, Homo sapiens
acagcucugcauacucauuag

SEQ ID NO: 47154 - RNA, 19 nt, Homo sapiens
acaggaaguagaggaggcc

SEQ ID NO: 47155 - RNA, 23 nt, Homo sapiens
acaggaaguagaggaggccacgu

SEQ ID NO: 47156 - RNA, 14 nt, Homo sapiens
acaggaauuuucau

SEQ ID NO: 47157 - RNA, 21 nt, Homo sapiens
acaggaauuuucauuguucua

SEQ ID NO: 47158 - RNA, 20 nt, Homo sapiens
acaggauggcaggaggcauc

SEQ ID NO: 47159 - RNA, 23 nt, Homo sapiens
acaggaugguucccuugaugaag

SEQ ID NO: 47160 - RNA, 17 nt, Homo sapiens
acaggcaaauuccugac

SEQ ID NO: 47161 - RNA, 10 nt, Homo sapiens
acaggcguga

SEQ ID NO: 47162 - RNA, 11 nt, Homo sapiens
acaggcgugag

SEQ ID NO: 47163 - RNA, 15 nt, Homo sapiens
acaggcgugagccac

SEQ ID NO: 47164 - RNA, 16 nt, Homo sapiens
acaggcgugagccacc

SEQ ID NO: 47165 - RNA, 18 nt, Homo sapiens
acaggcgugagccaccaa

SEQ ID NO: 47166 - RNA, 20 nt, Homo sapiens
acaggcuccaaacuggagcu

SEQ ID NO: 47167 - RNA, 13 nt, Homo sapiens
acaggggagaacc

SEQ ID NO: 47168 - RNA, 14 nt, Homo sapiens
acagucacauucca

SEQ ID NO: 47169 - RNA, 15 nt, Homo sapiens
acagucacauuccaa

SEQ ID NO: 47170 - RNA, 13 nt, Homo sapiens
acagucucaggaa

SEQ ID NO: 47171 - RNA, 20 nt, Homo sapiens
acagucucaggaaaucaaau

SEQ ID NO: 47172 - RNA, 19 nt, Homo sapiens
acagugauuaccagggacu

SEQ ID NO: 47173 - RNA, 20 nt, Homo sapiens
acagugucuggcacuuggga

SEQ ID NO: 47174 - RNA, 17 nt, Homo sapiens
acaguuacucagaauuc

SEQ ID NO: 47175 - RNA, 19 nt, Homo sapiens
acaguuccugagaccagcc

SEQ ID NO: 47176 - RNA, 20 nt, Homo sapiens
acaguuccugagaccagcca

SEQ ID NO: 47177 - RNA, 16 nt, Homo sapiens
acaguuuucugagaaa

SEQ ID NO: 47178 - RNA, 19 nt, Homo sapiens
acaguuuucugagaaagac

SEQ ID NO: 47179 - RNA, 19 nt, Homo sapiens
acaguuuugguugcuuuaa

SEQ ID NO: 47180 - RNA, 21 nt, Homo sapiens
acaguuuugguugcuuuaaua

SEQ ID NO: 47181 - RNA, 19 nt, Homo sapiens
acauaagcaaagacuauga

SEQ ID NO: 47182 - RNA, 17 nt, Homo sapiens
acauaaggaaacugggu

SEQ ID NO: 47183 - RNA, 17 nt, Homo sapiens
acauaaugcgugcauac

SEQ ID NO: 47184 - RNA, 12 nt, Homo sapiens
acauacaauuau

SEQ ID NO: 47185 - RNA, 21 nt, Homo sapiens
acauacuauagauucuuuauu

SEQ ID NO: 47186 - RNA, 11 nt, Homo sapiens
acauacugcug

SEQ ID NO: 47187 - RNA, 20 nt, Homo sapiens
acauagaauuaacacaugau

SEQ ID NO: 47188 - RNA, 13 nt, Homo sapiens
acauagcaucuca

SEQ ID NO: 47189 - RNA, 22 nt, Homo sapiens
acauauauaacaaugcuguauu

SEQ ID NO: 47190 - RNA, 15 nt, Homo sapiens
acaucaacagauaaa

SEQ ID NO: 47191 - RNA, 18 nt, Homo sapiens
acaucagcuugcccuguu

SEQ ID NO: 47192 - RNA, 18 nt, Homo sapiens
acaucaguuacucugaag

SEQ ID NO: 47193 - RNA, 15 nt, Homo sapiens
acaucuagugagcag

SEQ ID NO: 47194 - RNA, 13 nt, Homo sapiens
acaucuuucacau

SEQ ID NO: 47195 - RNA, 20 nt, Homo sapiens
acaugagagacagcaggucu

SEQ ID NO: 47196 - RNA, 10 nt, Homo sapiens
acaugggaca

SEQ ID NO: 47197 - RNA, 16 nt, Homo sapiens
acaugggacauuugcu

SEQ ID NO: 47198 - RNA, 14 nt, Homo sapiens
acaugggccccaga

SEQ ID NO: 47199 - RNA, 16 nt, Homo sapiens
acaugucagccacugu

SEQ ID NO: 47200 - RNA, 18 nt, Homo sapiens
acaugucagccacuguga

SEQ ID NO: 47201 - RNA, 20 nt, Homo sapiens
acauuacaguuagagauuuu

SEQ ID NO: 47202 - RNA, 17 nt, Homo sapiens
acauuauuggacuucca

SEQ ID NO: 47203 - RNA, 24 nt, Homo sapiens
acauuccugaacaggauauucuca

SEQ ID NO: 47204 - RNA, 14 nt, Homo sapiens
acauuucucauguu

SEQ ID NO: 47205 - RNA, 18 nt, Homo sapiens
acauuugcucauggaauu

SEQ ID NO: 47206 - RNA, 16 nt, Homo sapiens
acauuuuaugucuuuc

SEQ ID NO: 47207 - RNA, 23 nt, Homo sapiens
acauuuuuaagugcugcauuuaa

SEQ ID NO: 47208 - RNA, 13 nt, Homo sapiens
acauuuuuuuuuu

SEQ ID NO: 47209 - RNA, 20 nt, Homo sapiens
acauuuuuuuuuucaauaaa

SEQ ID NO: 47210 - RNA, 17 nt, Homo sapiens
accaaaaaucucaauau

SEQ ID NO: 47211 - RNA, 17 nt, Homo sapiens
accaaaccagagccuga

SEQ ID NO: 47212 - RNA, 20 nt, Homo sapiens
accaaacccggccugauuaa

SEQ ID NO: 47213 - RNA, 18 nt, Homo sapiens
accaaggcccccgggccg

SEQ ID NO: 47214 - RNA, 19 nt, Homo sapiens
accaaggcccccgggccga

SEQ ID NO: 47215 - RNA, 20 nt, Homo sapiens
accaaggcccccgggccgac

SEQ ID NO: 47216 - RNA, 23 nt, Homo sapiens
accaaggcccccgggccgacgga

SEQ ID NO: 47217 - RNA, 20 nt, Homo sapiens
accaauauuguacaguuuuu

SEQ ID NO: 47218 - RNA, 12 nt, Homo sapiens
accacagacaua

SEQ ID NO: 47219 - RNA, 20 nt, Homo sapiens
accacagcaguugaaaagac

SEQ ID NO: 47220 - RNA, 12 nt, Homo sapiens
accacauggcuu

SEQ ID NO: 47221 - RNA, 19 nt, Homo sapiens
accaccacccuugccaugg

SEQ ID NO: 47222 - RNA, 12 nt, Homo sapiens
accaccuuucag

SEQ ID NO: 47223 - RNA, 12 nt, Homo sapiens
accacugcagaa

SEQ ID NO: 47224 - RNA, 20 nt, Homo sapiens
accacugcagaagacaguau

SEQ ID NO: 47225 - RNA, 16 nt, Homo sapiens
accacuuuuugcagcu

SEQ ID NO: 47226 - RNA, 17 nt, Homo sapiens
accacuuuuugcagcuu

SEQ ID NO: 47227 - RNA, 18 nt, Homo sapiens
accacuuuuugcagcuuu

SEQ ID NO: 47228 - RNA, 19 nt, Homo sapiens
accagagauaauaugagaa

SEQ ID NO: 47229 - RNA, 14 nt, Homo sapiens
accagccaaccugg

SEQ ID NO: 47230 - RNA, 21 nt, Homo sapiens
accagcccuacaccauuccuu

SEQ ID NO: 47231 - RNA, 11 nt, Homo sapiens
accagccuggu

SEQ ID NO: 47232 - RNA, 14 nt, Homo sapiens
accaggcaccccca

SEQ ID NO: 47233 - RNA, 12 nt, Homo sapiens
accagggagccc

SEQ ID NO: 47234 - RNA, 19 nt, Homo sapiens
accaguaacggaacaguau

SEQ ID NO: 47235 - RNA, 16 nt, Homo sapiens
accagucugacuguuu

SEQ ID NO: 47236 - RNA, 22 nt, Homo sapiens
accagucugacuguuuccauca

SEQ ID NO: 47237 - RNA, 13 nt, Homo sapiens
accauaauucugg

SEQ ID NO: 47238 - RNA, 12 nt, Homo sapiens
accaucccggcc

SEQ ID NO: 47239 - RNA, 16 nt, Homo sapiens
accaucccggccggcg

SEQ ID NO: 47240 - RNA, 20 nt, Homo sapiens
accaucccggccggcgcgcu

SEQ ID NO: 47241 - RNA, 14 nt, Homo sapiens
accaugccauuuaa

SEQ ID NO: 47242 - RNA, 19 nt, Homo sapiens
accauuuuugaaaccaaac

SEQ ID NO: 47243 - RNA, 14 nt, Homo sapiens
acccaaaaggcaga

SEQ ID NO: 47244 - RNA, 17 nt, Homo sapiens
acccaaauguucaucaa

SEQ ID NO: 47245 - RNA, 19 nt, Homo sapiens
acccauauuuguacaccaa

SEQ ID NO: 47246 - RNA, 20 nt, Homo sapiens
accccagacgaugucuucau

SEQ ID NO: 47247 - RNA, 22 nt, Homo sapiens
accccagggcuugugugcacau

SEQ ID NO: 47248 - RNA, 23 nt, Homo sapiens
accccagggcuugugugcacaua

SEQ ID NO: 47249 - RNA, 14 nt, Homo sapiens
accccaucauccuc

SEQ ID NO: 47250 - RNA, 15 nt, Homo sapiens
acccgcccaccgcag

SEQ ID NO: 47251 - RNA, 11 nt, Homo sapiens
acccgggaggc

SEQ ID NO: 47252 - RNA, 13 nt, Homo sapiens
acccgggaggcag

SEQ ID NO: 47253 - RNA, 14 nt, Homo sapiens
acccgggaggcaga

SEQ ID NO: 47254 - RNA, 17 nt, Homo sapiens
acccucaagacaaauga

SEQ ID NO: 47255 - RNA, 13 nt, Homo sapiens
acccucaugcugc

SEQ ID NO: 47256 - RNA, 14 nt, Homo sapiens
acccucaugcugcc

SEQ ID NO: 47257 - RNA, 14 nt, Homo sapiens
acccucugggucuc

SEQ ID NO: 47258 - RNA, 15 nt, Homo sapiens
acccucugggucuca

SEQ ID NO: 47259 - RNA, 22 nt, Homo sapiens
acccucugggucucaguguccu

SEQ ID NO: 47260 - RNA, 13 nt, Homo sapiens
acccuugccaugg

SEQ ID NO: 47261 - RNA, 22 nt, Homo sapiens
accgcagggugaacugcagcga

SEQ ID NO: 47262 - RNA, 13 nt, Homo sapiens
accgcuguacgcg

SEQ ID NO: 47263 - RNA, 18 nt, Homo sapiens
accgcuguacgcgagcgc

SEQ ID NO: 47264 - RNA, 20 nt, Homo sapiens
accgcuguacgcgagcgcgc

SEQ ID NO: 47265 - RNA, 21 nt, Homo sapiens
accgcuguacgcgagcgcgcg

SEQ ID NO: 47266 - RNA, 23 nt, Homo sapiens
accgcuguacgcgagcgcgcgcg

SEQ ID NO: 47267 - RNA, 20 nt, Homo sapiens
accucccaacgucccuagcc

SEQ ID NO: 47268 - RNA, 22 nt, Homo sapiens
accuccugccuaagugcagccc

SEQ ID NO: 47269 - RNA, 13 nt, Homo sapiens
accuccugccuca

SEQ ID NO: 47270 - RNA, 18 nt, Homo sapiens
accucuaaauucuuucau

SEQ ID NO: 47271 - RNA, 13 nt, Homo sapiens
accucucaccucc

SEQ ID NO: 47272 - RNA, 15 nt, Homo sapiens
accucuccagccuca

SEQ ID NO: 47273 - RNA, 22 nt, Homo sapiens
accucuccagccucagcucuca

SEQ ID NO: 47274 - RNA, 12 nt, Homo sapiens
accucuccauga

SEQ ID NO: 47275 - RNA, 14 nt, Homo sapiens
accucuccaugauc

SEQ ID NO: 47276 - RNA, 22 nt, Homo sapiens
accucuccaugaucccaccucc

SEQ ID NO: 47277 - RNA, 18 nt, Homo sapiens
accucucccaacuauaaa

SEQ ID NO: 47278 - RNA, 17 nt, Homo sapiens
accucuugagccuugaa

SEQ ID NO: 47279 - RNA, 9 nt, Homo sapiens
accugagcc

SEQ ID NO: 47280 - RNA, 11 nt, Homo sapiens
accugagcccc

SEQ ID NO: 47281 - RNA, 12 nt, Homo sapiens
accugagcccca

SEQ ID NO: 47282 - RNA, 11 nt, Homo sapiens
accugcaggcg

SEQ ID NO: 47283 - RNA, 14 nt, Homo sapiens
accugcuucuauua

SEQ ID NO: 47284 - RNA, 21 nt, Homo sapiens
accugcuucuauuagcccuuc

SEQ ID NO: 47285 - RNA, 15 nt, Homo sapiens
accuggaauauauaa

SEQ ID NO: 47286 - RNA, 20 nt, Homo sapiens
accugggaaagggcuguuau

SEQ ID NO: 47287 - RNA, 21 nt, Homo sapiens
accugggaaagggcuguuaua

SEQ ID NO: 47288 - RNA, 20 nt, Homo sapiens
accugggccauagucauucu

SEQ ID NO: 47289 - RNA, 14 nt, Homo sapiens
accuguaaucccag

SEQ ID NO: 47290 - RNA, 15 nt, Homo sapiens
accuguaaucccagc

SEQ ID NO: 47291 - RNA, 12 nt, Homo sapiens
accuguccccga

SEQ ID NO: 47292 - RNA, 13 nt, Homo sapiens
accuguccccgaa

SEQ ID NO: 47293 - RNA, 15 nt, Homo sapiens
accuguccccgaaac

SEQ ID NO: 47294 - RNA, 14 nt, Homo sapiens
accugugagaccaa

SEQ ID NO: 47295 - RNA, 19 nt, Homo sapiens
accuguggccaaguucuua

SEQ ID NO: 47296 - RNA, 13 nt, Homo sapiens
accuguucgcgcg

SEQ ID NO: 47297 - RNA, 14 nt, Homo sapiens
accuguucgcgcgc

SEQ ID NO: 47298 - RNA, 17 nt, Homo sapiens
accuguucgcgcgccuc

SEQ ID NO: 47299 - RNA, 18 nt, Homo sapiens
accuguucgcgcgccucc

SEQ ID NO: 47300 - RNA, 20 nt, Homo sapiens
accuguucgcgcgccuccgc

SEQ ID NO: 47301 - RNA, 19 nt, Homo sapiens
accuguuuuuaagcuguuu

SEQ ID NO: 47302 - RNA, 16 nt, Homo sapiens
accuuacuucuucuca

SEQ ID NO: 47303 - RNA, 17 nt, Homo sapiens
accuuauuguaccucuc

SEQ ID NO: 47304 - RNA, 16 nt, Homo sapiens
accuucucaccuguga

SEQ ID NO: 47305 - RNA, 13 nt, Homo sapiens
accuucuggguuc

SEQ ID NO: 47306 - RNA, 14 nt, Homo sapiens
accuucuggguuca

SEQ ID NO: 47307 - RNA, 20 nt, Homo sapiens
accuuucagauaacuguuau

SEQ ID NO: 47308 - RNA, 21 nt, Homo sapiens
accuuucagauaacuguuauu

SEQ ID NO: 47309 - RNA, 22 nt, Homo sapiens
accuuucagauaacuguuauuu

SEQ ID NO: 47310 - RNA, 17 nt, Homo sapiens
accuuuggaugcacuuu

SEQ ID NO: 47311 - RNA, 19 nt, Homo sapiens
accuuuggaugcacuuuau

SEQ ID NO: 47312 - RNA, 15 nt, Homo sapiens
acgaaaaacauuuca

SEQ ID NO: 47313 - RNA, 23 nt, Homo sapiens
acgaaguauccuucagccugaaa

SEQ ID NO: 47314 - RNA, 17 nt, Homo sapiens
acgcauggaaaaguuuc

SEQ ID NO: 47315 - RNA, 16 nt, Homo sapiens
acgccuguaaucccag

SEQ ID NO: 47316 - RNA, 16 nt, Homo sapiens
acgcgagcgcgcgcgc

SEQ ID NO: 47317 - RNA, 17 nt, Homo sapiens
acgcgagcgcgcgcgcc

SEQ ID NO: 47318 - RNA, 18 nt, Homo sapiens
acgcgagcgcgcgcgccc

SEQ ID NO: 47319 - RNA, 19 nt, Homo sapiens
acgcgagcgcgcgcgcccu

SEQ ID NO: 47320 - RNA, 20 nt, Homo sapiens
acgcgagcgcgcgcgcccuc

SEQ ID NO: 47321 - RNA, 13 nt, Homo sapiens
acgcgcgcuccgc

SEQ ID NO: 47322 - RNA, 14 nt, Homo sapiens
acgcgcgcuccgcg

SEQ ID NO: 47323 - RNA, 15 nt, Homo sapiens
acgcgcgcuccgcgc

SEQ ID NO: 47324 - RNA, 16 nt, Homo sapiens
acgcgcgcuccgcgca

SEQ ID NO: 47325 - RNA, 17 nt, Homo sapiens
acgcgcgcuccgcgcag

SEQ ID NO: 47326 - RNA, 19 nt, Homo sapiens
acgcgcgcuccgcgcagcu

SEQ ID NO: 47327 - RNA, 20 nt, Homo sapiens
acgcgcgcuccgcgcagcuc

SEQ ID NO: 47328 - RNA, 17 nt, Homo sapiens
acgcucugggucgccgg

SEQ ID NO: 47329 - RNA, 19 nt, Homo sapiens
acgcucugggucgccggca

SEQ ID NO: 47330 - RNA, 20 nt, Homo sapiens
acgcucugggucgccggcau

SEQ ID NO: 47331 - RNA, 21 nt, Homo sapiens
acgcucugggucgccggcauc

SEQ ID NO: 47332 - RNA, 20 nt, Homo sapiens
acggagauaucccaggaaaa

SEQ ID NO: 47333 - RNA, 12 nt, Homo sapiens
acggagccggga

SEQ ID NO: 47334 - RNA, 11 nt, Homo sapiens
acggcuccgga

SEQ ID NO: 47335 - RNA, 18 nt, Homo sapiens
acggcuccggacgcugcu

SEQ ID NO: 47336 - RNA, 22 nt, Homo sapiens
acggcuccggacgcugcugccg

SEQ ID NO: 47337 - RNA, 15 nt, Homo sapiens
acggcuggagcugcc

SEQ ID NO: 47338 - RNA, 19 nt, Homo sapiens
acgucccuagcccuuacgu

SEQ ID NO: 47339 - RNA, 14 nt, Homo sapiens
acgucuuaaauauu

SEQ ID NO: 47340 - RNA, 11 nt, Homo sapiens
acgugacuggc

SEQ ID NO: 47341 - RNA, 14 nt, Homo sapiens
acgugacuggccug

SEQ ID NO: 47342 - RNA, 20 nt, Homo sapiens
acgugacuggccugcuggau

SEQ ID NO: 47343 - RNA, 16 nt, Homo sapiens
acgugauuuuuaaauu

SEQ ID NO: 47344 - RNA, 17 nt, Homo sapiens
acgugauuuuuaaauua

SEQ ID NO: 47345 - RNA, 10 nt, Homo sapiens
acgugcaaua

SEQ ID NO: 47346 - RNA, 11 nt, Homo sapiens
acgugcaauac

SEQ ID NO: 47347 - RNA, 15 nt, Homo sapiens
acgugggcauucaaa

SEQ ID NO: 47348 - RNA, 22 nt, Homo sapiens
acguuucuaaaggcuaccuuug

SEQ ID NO: 47349 - RNA, 14 nt, Homo sapiens
acuaaaauguucua

SEQ ID NO: 47350 - RNA, 20 nt, Homo sapiens
acuaauagaauuaauggaau

SEQ ID NO: 47351 - RNA, 14 nt, Homo sapiens
acuaauuaggcaag

SEQ ID NO: 47352 - RNA, 21 nt, Homo sapiens
acuagaguuuagcuggaaaag

SEQ ID NO: 47353 - RNA, 12 nt, Homo sapiens
acuagucuuaua

SEQ ID NO: 47354 - RNA, 17 nt, Homo sapiens
acuaguuguaauuuuuu

SEQ ID NO: 47355 - RNA, 14 nt, Homo sapiens
acuauaaaacuagg

SEQ ID NO: 47356 - RNA, 15 nt, Homo sapiens
acuaucucauuucca

SEQ ID NO: 47357 - RNA, 15 nt, Homo sapiens
acuauucaaacaguc

SEQ ID NO: 47358 - RNA, 22 nt, Homo sapiens
acuauuuaagagaacaagcaaa

SEQ ID NO: 47359 - RNA, 14 nt, Homo sapiens
acucagaaacauca

SEQ ID NO: 47360 - RNA, 22 nt, Homo sapiens
acucagaauucucuaguuugau

SEQ ID NO: 47361 - RNA, 12 nt, Homo sapiens
acucauugcaac

SEQ ID NO: 47362 - RNA, 19 nt, Homo sapiens
acucauugcaaccuccacc

SEQ ID NO: 47363 - RNA, 23 nt, Homo sapiens
acucauugcaaccuccaccuucu

SEQ ID NO: 47364 - RNA, 17 nt, Homo sapiens
acucauuuuuguuuuca

SEQ ID NO: 47365 - RNA, 22 nt, Homo sapiens
acuccaaagaaauguaagggaa

SEQ ID NO: 47366 - RNA, 20 nt, Homo sapiens
acuccacuuggacaugggcc

SEQ ID NO: 47367 - RNA, 13 nt, Homo sapiens
acuccagccuggg

SEQ ID NO: 47368 - RNA, 14 nt, Homo sapiens
acuccagccugggu

SEQ ID NO: 47369 - RNA, 21 nt, Homo sapiens
acuccugguuccuaggugagc

SEQ ID NO: 47370 - RNA, 22 nt, Homo sapiens
acuccugguuccuaggugagca

SEQ ID NO: 47371 - RNA, 22 nt, Homo sapiens
acucuacaaaauauagcuuuca

SEQ ID NO: 47372 - RNA, 19 nt, Homo sapiens
acucugaaggguaauuaua

SEQ ID NO: 47373 - RNA, 19 nt, Homo sapiens
acucuggucaagaagcauc

SEQ ID NO: 47374 - RNA, 21 nt, Homo sapiens
acucuuaagaagacugcauua

SEQ ID NO: 47375 - RNA, 15 nt, Homo sapiens
acugaaauaaacguc

SEQ ID NO: 47376 - RNA, 14 nt, Homo sapiens
acugaacauuccag

SEQ ID NO: 47377 - RNA, 13 nt, Homo sapiens
acugacaacuuga

SEQ ID NO: 47378 - RNA, 15 nt, Homo sapiens
acugacucuuaagaa

SEQ ID NO: 47379 - RNA, 17 nt, Homo sapiens
acugagcuucucuguga

SEQ ID NO: 47380 - RNA, 19 nt, Homo sapiens
acugaguacguugugcauu

SEQ ID NO: 47381 - RNA, 15 nt, Homo sapiens
acugcacugucaaga

SEQ ID NO: 47382 - RNA, 16 nt, Homo sapiens
acugcacugucaagau

SEQ ID NO: 47383 - RNA, 20 nt, Homo sapiens
acugcacugucaagaugaug

SEQ ID NO: 47384 - RNA, 19 nt, Homo sapiens
acugcagcgaguacuuccc

SEQ ID NO: 47385 - RNA, 21 nt, Homo sapiens
acugcagcgaguacuucccgc

SEQ ID NO: 47386 - RNA, 14 nt, Homo sapiens
acugcauacaaucu

SEQ ID NO: 47387 - RNA, 14 nt, Homo sapiens
acugcauuauauuu

SEQ ID NO: 47388 - RNA, 15 nt, Homo sapiens
acugcauuauauuua

SEQ ID NO: 47389 - RNA, 14 nt, Homo sapiens
acugccuaucagca

SEQ ID NO: 47390 - RNA, 22 nt, Homo sapiens
acugccuucucaacuccaaacu

SEQ ID NO: 47391 - RNA, 22 nt, Homo sapiens
acuggcacaguuuucugagaaa

SEQ ID NO: 47392 - RNA, 16 nt, Homo sapiens
acuggcaguuuuccau

SEQ ID NO: 47393 - RNA, 14 nt, Homo sapiens
acuggccugcugga

SEQ ID NO: 47394 - RNA, 16 nt, Homo sapiens
acuggcucccuggaag

SEQ ID NO: 47395 - RNA, 13 nt, Homo sapiens
acuggcuguuaau

SEQ ID NO: 47396 - RNA, 9 nt, Homo sapiens
acugggaca

SEQ ID NO: 47397 - RNA, 18 nt, Homo sapiens
acugggguggguggggca

SEQ ID NO: 47398 - RNA, 19 nt, Homo sapiens
acugggguggguggggcag

SEQ ID NO: 47399 - RNA, 21 nt, Homo sapiens
acugggguggguggggcagug

SEQ ID NO: 47400 - RNA, 23 nt, Homo sapiens
acugggguggguggggcagugcu

SEQ ID NO: 47401 - RNA, 21 nt, Homo sapiens
acuguaaagcuuugugcagau

SEQ ID NO: 47402 - RNA, 22 nt, Homo sapiens
acugucaauuuggcagugauau

SEQ ID NO: 47403 - RNA, 14 nt, Homo sapiens
acugucucacuuaa

SEQ ID NO: 47404 - RNA, 12 nt, Homo sapiens
acugugacugua

SEQ ID NO: 47405 - RNA, 20 nt, Homo sapiens
acuguuuagaugaaugucag

SEQ ID NO: 47406 - RNA, 23 nt, Homo sapiens
acuuaagguuaccuuuguuccca

SEQ ID NO: 47407 - RNA, 13 nt, Homo sapiens
acuuacuguacau

SEQ ID NO: 47408 - RNA, 20 nt, Homo sapiens
acuuauaggaauugacccac

SEQ ID NO: 47409 - RNA, 14 nt, Homo sapiens
acuuauuuauauaa

SEQ ID NO: 47410 - RNA, 17 nt, Homo sapiens
acuuauuuguacauuuu

SEQ ID NO: 47411 - RNA, 18 nt, Homo sapiens
acuuauuuguacauuuuu

SEQ ID NO: 47412 - RNA, 16 nt, Homo sapiens
acuucauuaauaauaa

SEQ ID NO: 47413 - RNA, 23 nt, Homo sapiens
acuucauucuugaaagcuguggc

SEQ ID NO: 47414 - RNA, 20 nt, Homo sapiens
acuuccagggcuacgcgcgc

SEQ ID NO: 47415 - RNA, 21 nt, Homo sapiens
acuuccagggcuacgcgcgcu

SEQ ID NO: 47416 - RNA, 23 nt, Homo sapiens
acuuccagggcuacgcgcgcucc

SEQ ID NO: 47417 - RNA, 21 nt, Homo sapiens
acuucccgcuguuccucgcca

SEQ ID NO: 47418 - RNA, 17 nt, Homo sapiens
acuuccucccggccgcg

SEQ ID NO: 47419 - RNA, 21 nt, Homo sapiens
acuuccuuggacucauuuuaa

SEQ ID NO: 47420 - RNA, 19 nt, Homo sapiens
acuucuaaguaaaaccaca

SEQ ID NO: 47421 - RNA, 22 nt, Homo sapiens
acuucuaaguaaaaccacagca

SEQ ID NO: 47422 - RNA, 15 nt, Homo sapiens
acuucugucuucaca

SEQ ID NO: 47423 - RNA, 21 nt, Homo sapiens
acuucuuaguaugugcauuua

SEQ ID NO: 47424 - RNA, 15 nt, Homo sapiens
acuucuucucauacu

SEQ ID NO: 47425 - RNA, 17 nt, Homo sapiens
acuucuucucauacuau

SEQ ID NO: 47426 - RNA, 18 nt, Homo sapiens
acuugaugauacaaugaa

SEQ ID NO: 47427 - RNA, 19 nt, Homo sapiens
acuugggcgggacacaggc

SEQ ID NO: 47428 - RNA, 15 nt, Homo sapiens
acuugucaauaaaau

SEQ ID NO: 47429 - RNA, 19 nt, Homo sapiens
acuuuaacacagugucugg

SEQ ID NO: 47430 - RNA, 12 nt, Homo sapiens
acuuuaccuuuu

SEQ ID NO: 47431 - RNA, 15 nt, Homo sapiens
acuuuacugucccca

SEQ ID NO: 47432 - RNA, 15 nt, Homo sapiens
acuuuccaauaaaga

SEQ ID NO: 47433 - RNA, 13 nt, Homo sapiens
acuuugaccucug

SEQ ID NO: 47434 - RNA, 15 nt, Homo sapiens
acuuugauuuuauau

SEQ ID NO: 47435 - RNA, 12 nt, Homo sapiens
acuuugugaaaa

SEQ ID NO: 47436 - RNA, 9 nt, Homo sapiens
acuuuucca

SEQ ID NO: 47437 - RNA, 17 nt, Homo sapiens
acuuuuccaaugacauu

SEQ ID NO: 47438 - RNA, 18 nt, Homo sapiens
acuuuuccaaugacauuu

SEQ ID NO: 47439 - RNA, 19 nt, Homo sapiens
agaaaacaggcaaauuccu

SEQ ID NO: 47440 - RNA, 17 nt, Homo sapiens
agaaaauaaaagcacuu

SEQ ID NO: 47441 - RNA, 15 nt, Homo sapiens
agaaaauaucacuug

SEQ ID NO: 47442 - RNA, 21 nt, Homo sapiens
agaaaccuuauuguaccucuc

SEQ ID NO: 47443 - RNA, 14 nt, Homo sapiens
agaaauaggaaaua

SEQ ID NO: 47444 - RNA, 22 nt, Homo sapiens
agaaauuccaggaaaaucugca

SEQ ID NO: 47445 - RNA, 23 nt, Homo sapiens
agaaauuccaggaaaaucugcac

SEQ ID NO: 47446 - RNA, 16 nt, Homo sapiens
agaacaggaaaauaaa

SEQ ID NO: 47447 - RNA, 17 nt, Homo sapiens
agaacaggaaaauaaaa

SEQ ID NO: 47448 - RNA, 23 nt, Homo sapiens
agaacuuauuuguacauuuuuuu

SEQ ID NO: 47449 - RNA, 15 nt, Homo sapiens
agaagaacugaaauc

SEQ ID NO: 47450 - RNA, 12 nt, Homo sapiens
agaagagaauau

SEQ ID NO: 47451 - RNA, 12 nt, Homo sapiens
agaagagccgga

SEQ ID NO: 47452 - RNA, 14 nt, Homo sapiens
agaagagccggagc

SEQ ID NO: 47453 - RNA, 15 nt, Homo sapiens
agaagaggaaagaga

SEQ ID NO: 47454 - RNA, 17 nt, Homo sapiens
agaagaggaaagagaga

SEQ ID NO: 47455 - RNA, 22 nt, Homo sapiens
agaagauggcacuuauaaccaa

SEQ ID NO: 47456 - RNA, 17 nt, Homo sapiens
agaaggauguacauuuc

SEQ ID NO: 47457 - RNA, 20 nt, Homo sapiens
agaaggauguacauuuccaa

SEQ ID NO: 47458 - RNA, 22 nt, Homo sapiens
agaagugaaaaucuacacucca

SEQ ID NO: 47459 - RNA, 17 nt, Homo sapiens
agaaguuaagcaacauc

SEQ ID NO: 47460 - RNA, 11 nt, Homo sapiens
agaaguuuucu

SEQ ID NO: 47461 - RNA, 18 nt, Homo sapiens
agaauacuaauaaaauac

SEQ ID NO: 47462 - RNA, 18 nt, Homo sapiens
agaauauaaaaauaaagc

SEQ ID NO: 47463 - RNA, 15 nt, Homo sapiens
agaauauauuuccuu

SEQ ID NO: 47464 - RNA, 20 nt, Homo sapiens
agaauauuaaaaauuaauuc

SEQ ID NO: 47465 - RNA, 19 nt, Homo sapiens
agaauauuuauuaccucug

SEQ ID NO: 47466 - RNA, 13 nt, Homo sapiens
agaaucacuugaa

SEQ ID NO: 47467 - RNA, 14 nt, Homo sapiens
agaaucacuugaac

SEQ ID NO: 47468 - RNA, 16 nt, Homo sapiens
agaaucacuugaaccc

SEQ ID NO: 47469 - RNA, 17 nt, Homo sapiens
agaaucagaucauuuca

SEQ ID NO: 47470 - RNA, 18 nt, Homo sapiens
agaaugauuaugaauuac

SEQ ID NO: 47471 - RNA, 13 nt, Homo sapiens
agaauguuuucaa

SEQ ID NO: 47472 - RNA, 21 nt, Homo sapiens
agaauucuguugauggaaaua

SEQ ID NO: 47473 - RNA, 19 nt, Homo sapiens
agaauugcuugaacccagg

SEQ ID NO: 47474 - RNA, 23 nt, Homo sapiens
agaauuuucaaaaucaaauucca

SEQ ID NO: 47475 - RNA, 12 nt, Homo sapiens
agacaaugacuu

SEQ ID NO: 47476 - RNA, 19 nt, Homo sapiens
agacaaugacuuacuguac

SEQ ID NO: 47477 - RNA, 20 nt, Homo sapiens
agacaauuuauuauggcaca

SEQ ID NO: 47478 - RNA, 15 nt, Homo sapiens
agacacaugggugcu

SEQ ID NO: 47479 - RNA, 17 nt, Homo sapiens
agacacaugggugcuau

SEQ ID NO: 47480 - RNA, 12 nt, Homo sapiens
agacaccaccac

SEQ ID NO: 47481 - RNA, 13 nt, Homo sapiens
agacaccaccacc

SEQ ID NO: 47482 - RNA, 14 nt, Homo sapiens
agacaccaccaccc

SEQ ID NO: 47483 - RNA, 20 nt, Homo sapiens
agacaccaccacccuugcca

SEQ ID NO: 47484 - RNA, 23 nt, Homo sapiens
agacaccaccacccuugccaugg

SEQ ID NO: 47485 - RNA, 14 nt, Homo sapiens
agacagaaagcaga

SEQ ID NO: 47486 - RNA, 22 nt, Homo sapiens
agacagaaagcagaacagugau

SEQ ID NO: 47487 - RNA, 12 nt, Homo sapiens
agacagcagguc

SEQ ID NO: 47488 - RNA, 13 nt, Homo sapiens
agacagcaggucu

SEQ ID NO: 47489 - RNA, 14 nt, Homo sapiens
agacagcaggucuc

SEQ ID NO: 47490 - RNA, 17 nt, Homo sapiens
agacagcaggucucaug

SEQ ID NO: 47491 - RNA, 19 nt, Homo sapiens
agacagggaaagggucucc

SEQ ID NO: 47492 - RNA, 23 nt, Homo sapiens
agacauagaauuaacacaugauc

SEQ ID NO: 47493 - RNA, 15 nt, Homo sapiens
agacaucaacagaua

SEQ ID NO: 47494 - RNA, 21 nt, Homo sapiens
agacaugagagacagcagguc

SEQ ID NO: 47495 - RNA, 20 nt, Homo sapiens
agaccagccaaccugggggc

SEQ ID NO: 47496 - RNA, 15 nt, Homo sapiens
agacccucaugcugc

SEQ ID NO: 47497 - RNA, 17 nt, Homo sapiens
agacccucaugcugcca

SEQ ID NO: 47498 - RNA, 19 nt, Homo sapiens
agacgggguuugccaugcu

SEQ ID NO: 47499 - RNA, 21 nt, Homo sapiens
agacgggguuugccaugcugg

SEQ ID NO: 47500 - RNA, 22 nt, Homo sapiens
agacgggguuugccaugcuggc

SEQ ID NO: 47501 - RNA, 21 nt, Homo sapiens
agacgugauuuugcuguagaa

SEQ ID NO: 47502 - RNA, 22 nt, Homo sapiens
agacuaugaggaauauuugcaa

SEQ ID NO: 47503 - RNA, 17 nt, Homo sapiens
agacuauucaaacaguc

SEQ ID NO: 47504 - RNA, 13 nt, Homo sapiens
agacuccaaagaa

SEQ ID NO: 47505 - RNA, 15 nt, Homo sapiens
agacugcauuauauu

SEQ ID NO: 47506 - RNA, 14 nt, Homo sapiens
agagaaauuugcca

SEQ ID NO: 47507 - RNA, 9 nt, Homo sapiens
agagaagau

SEQ ID NO: 47508 - RNA, 20 nt, Homo sapiens
agagaagauagcagggcaug

SEQ ID NO: 47509 - RNA, 17 nt, Homo sapiens
agagaauaaaaaaugua

SEQ ID NO: 47510 - RNA, 13 nt, Homo sapiens
agagaauuuccuu

SEQ ID NO: 47511 - RNA, 23 nt, Homo sapiens
agagacagaaagcagaacaguga

SEQ ID NO: 47512 - RNA, 19 nt, Homo sapiens
agagacagcaggucucaug

SEQ ID NO: 47513 - RNA, 19 nt, Homo sapiens
agagacgggguuugccaug

SEQ ID NO: 47514 - RNA, 20 nt, Homo sapiens
agagacgggguuugccaugc

SEQ ID NO: 47515 - RNA, 12 nt, Homo sapiens
agagacuuugug

SEQ ID NO: 47516 - RNA, 19 nt, Homo sapiens
agagcaagacucugucuca

SEQ ID NO: 47517 - RNA, 20 nt, Homo sapiens
agagcaagacucugucucaa

SEQ ID NO: 47518 - RNA, 12 nt, Homo sapiens
agagcaucucau

SEQ ID NO: 47519 - RNA, 22 nt, Homo sapiens
agagcccuucaugcauuugcac

SEQ ID NO: 47520 - RNA, 23 nt, Homo sapiens
agagcccuucaugcauuugcacu

SEQ ID NO: 47521 - RNA, 11 nt, Homo sapiens
agagccggagc

SEQ ID NO: 47522 - RNA, 12 nt, Homo sapiens
agagccggagcc

SEQ ID NO: 47523 - RNA, 13 nt, Homo sapiens
agagccggagccu

SEQ ID NO: 47524 - RNA, 19 nt, Homo sapiens
agagccggagccuccagcu

SEQ ID NO: 47525 - RNA, 23 nt, Homo sapiens
agagccggagccuccagcugccc

SEQ ID NO: 47526 - RNA, 21 nt, Homo sapiens
agagccugaguguugccuaau

SEQ ID NO: 47527 - RNA, 20 nt, Homo sapiens
agagcuacaggccccaucug

SEQ ID NO: 47528 - RNA, 21 nt, Homo sapiens
agagcuacaggccccaucugg

SEQ ID NO: 47529 - RNA, 22 nt, Homo sapiens
agagucuauuuacggaacucaa

SEQ ID NO: 47530 - RNA, 16 nt, Homo sapiens
agaguggguuucacaa

SEQ ID NO: 47531 - RNA, 21 nt, Homo sapiens
agaguucugucuggacuuucc

SEQ ID NO: 47532 - RNA, 13 nt, Homo sapiens
agauaaacaguag

SEQ ID NO: 47533 - RNA, 23 nt, Homo sapiens
agauaacuguuauuuauaaucac

SEQ ID NO: 47534 - RNA, 15 nt, Homo sapiens
agauaauacaccacu

SEQ ID NO: 47535 - RNA, 14 nt, Homo sapiens
agauaauaugagaa

SEQ ID NO: 47536 - RNA, 15 nt, Homo sapiens
agauaaucacaauac

SEQ ID NO: 47537 - RNA, 19 nt, Homo sapiens
agauaaucucuccauuccc

SEQ ID NO: 47538 - RNA, 12 nt, Homo sapiens
agauaccucucu

SEQ ID NO: 47539 - RNA, 15 nt, Homo sapiens
agauaccucucuugu

SEQ ID NO: 47540 - RNA, 21 nt, Homo sapiens
agauacugaaauaaacgucuu

SEQ ID NO: 47541 - RNA, 12 nt, Homo sapiens
agauauaauuua

SEQ ID NO: 47542 - RNA, 14 nt, Homo sapiens
agauaugaggcauu

SEQ ID NO: 47543 - RNA, 15 nt, Homo sapiens
agauaugaggcauuu

SEQ ID NO: 47544 - RNA, 19 nt, Homo sapiens
agauaugauucaaaugucu

SEQ ID NO: 47545 - RNA, 22 nt, Homo sapiens
agauauuuugcuuugugauuuu

SEQ ID NO: 47546 - RNA, 13 nt, Homo sapiens
agaucaagccugc

SEQ ID NO: 47547 - RNA, 17 nt, Homo sapiens
agaucaccaucaauuuu

SEQ ID NO: 47548 - RNA, 16 nt, Homo sapiens
agauccccguguuacu

SEQ ID NO: 47549 - RNA, 14 nt, Homo sapiens
agauccuggaaauc

SEQ ID NO: 47550 - RNA, 11 nt, Homo sapiens
agaucugcaac

SEQ ID NO: 47551 - RNA, 13 nt, Homo sapiens
agaugaaugucag

SEQ ID NO: 47552 - RNA, 14 nt, Homo sapiens
agaugaaugucagu

SEQ ID NO: 47553 - RNA, 14 nt, Homo sapiens
agaugaugaugauc

SEQ ID NO: 47554 - RNA, 19 nt, Homo sapiens
agaugcaguucugaagaag

SEQ ID NO: 47555 - RNA, 13 nt, Homo sapiens
agauguagaggag

SEQ ID NO: 47556 - RNA, 16 nt, Homo sapiens
agauguauguacuuca

SEQ ID NO: 47557 - RNA, 19 nt, Homo sapiens
agaugugaacacaucagcu

SEQ ID NO: 47558 - RNA, 19 nt, Homo sapiens
agaugugggcagugauguc

SEQ ID NO: 47559 - RNA, 23 nt, Homo sapiens
agauuaagagauggguuugacaa

SEQ ID NO: 47560 - RNA, 13 nt, Homo sapiens
agauuaugaucuc

SEQ ID NO: 47561 - RNA, 18 nt, Homo sapiens
agauuguauagugcaugu

SEQ ID NO: 47562 - RNA, 13 nt, Homo sapiens
agauuuaagauau

SEQ ID NO: 47563 - RNA, 23 nt, Homo sapiens
agauuuuguuuuuaaacuggaaa

SEQ ID NO: 47564 - RNA, 20 nt, Homo sapiens
agcaaaauggauaugacaca

SEQ ID NO: 47565 - RNA, 13 nt, Homo sapiens
agcaaaaugugau

SEQ ID NO: 47566 - RNA, 14 nt, Homo sapiens
agcaaaaugugaua

SEQ ID NO: 47567 - RNA, 15 nt, Homo sapiens
agcaaauuccaauac

SEQ ID NO: 47568 - RNA, 18 nt, Homo sapiens
agcaaauuccaauacauu

SEQ ID NO: 47569 - RNA, 20 nt, Homo sapiens
agcaaauuccaauacauuau

SEQ ID NO: 47570 - RNA, 21 nt, Homo sapiens
agcaacccaaauguucaucaa

SEQ ID NO: 47571 - RNA, 18 nt, Homo sapiens
agcaagacucugucucaa

SEQ ID NO: 47572 - RNA, 14 nt, Homo sapiens
agcaagauaauaaa

SEQ ID NO: 47573 - RNA, 22 nt, Homo sapiens
agcaagaucccauggguugugu

SEQ ID NO: 47574 - RNA, 16 nt, Homo sapiens
agcaaggagauuuaca

SEQ ID NO: 47575 - RNA, 21 nt, Homo sapiens
agcaagugaauuuuucucuaa

SEQ ID NO: 47576 - RNA, 14 nt, Homo sapiens
agcacacacuuuug

SEQ ID NO: 47577 - RNA, 19 nt, Homo sapiens
agcaccuacaguguacagu

SEQ ID NO: 47578 - RNA, 23 nt, Homo sapiens
agcaccugcaggcgugaccugac

SEQ ID NO: 47579 - RNA, 24 nt, Homo sapiens
agcaccugcaggcgugaccugaca

SEQ ID NO: 47580 - RNA, 21 nt, Homo sapiens
agcacuuuaacacagugucug

SEQ ID NO: 47581 - RNA, 15 nt, Homo sapiens
agcacuuugggaggc

SEQ ID NO: 47582 - RNA, 16 nt, Homo sapiens
agcacuuugggaggcu

SEQ ID NO: 47583 - RNA, 13 nt, Homo sapiens
agcagaaaugccu

SEQ ID NO: 47584 - RNA, 15 nt, Homo sapiens
agcagaacagugauu

SEQ ID NO: 47585 - RNA, 20 nt, Homo sapiens
agcagaacagugauuaccag

SEQ ID NO: 47586 - RNA, 20 nt, Homo sapiens
agcagcguuucuaugacaca

SEQ ID NO: 47587 - RNA, 21 nt, Homo sapiens
agcagcuuauucacaagaccc

SEQ ID NO: 47588 - RNA, 19 nt, Homo sapiens
agcaggauagagugggaca

SEQ ID NO: 47589 - RNA, 16 nt, Homo sapiens
agcaggcuacugucag

SEQ ID NO: 47590 - RNA, 17 nt, Homo sapiens
agcagggacuugaaccc

SEQ ID NO: 47591 - RNA, 18 nt, Homo sapiens
agcagggacuugaaccca

SEQ ID NO: 47592 - RNA, 17 nt, Homo sapiens
agcagucaggaaagaga

SEQ ID NO: 47593 - RNA, 18 nt, Homo sapiens
agcauaccaacacgagca

SEQ ID NO: 47594 - RNA, 22 nt, Homo sapiens
agcauaccaacacgagcaggcu

SEQ ID NO: 47595 - RNA, 16 nt, Homo sapiens
agcauacguacacauu

SEQ ID NO: 47596 - RNA, 21 nt, Homo sapiens
agcauacguacacauuuuauu

SEQ ID NO: 47597 - RNA, 22 nt, Homo sapiens
agcauauguuuuuguaaguuua

SEQ ID NO: 47598 - RNA, 23 nt, Homo sapiens
agcauccuggaauaucuccguca

SEQ ID NO: 47599 - RNA, 15 nt, Homo sapiens
agcaucucugaacau

SEQ ID NO: 47600 - RNA, 15 nt, Homo sapiens
agcaugggaagugac

SEQ ID NO: 47601 - RNA, 17 nt, Homo sapiens
agcaugggccuagccca

SEQ ID NO: 47602 - RNA, 16 nt, Homo sapiens
agcauuccaacuaucu

SEQ ID NO: 47603 - RNA, 18 nt, Homo sapiens
agcauuguaaaugugcuu

SEQ ID NO: 47604 - RNA, 12 nt, Homo sapiens
agccaaaaacca

SEQ ID NO: 47605 - RNA, 18 nt, Homo sapiens
agccaaguuuauauacaa

SEQ ID NO: 47606 - RNA, 15 nt, Homo sapiens
agccaccaaacccgg

SEQ ID NO: 47607 - RNA, 16 nt, Homo sapiens
agccaccaaacccggc

SEQ ID NO: 47608 - RNA, 13 nt, Homo sapiens
agccacugugaua

SEQ ID NO: 47609 - RNA, 14 nt, Homo sapiens
agccacuucacuuu

SEQ ID NO: 47610 - RNA, 23 nt, Homo sapiens
agccagccuugcuccuggcuggg

SEQ ID NO: 47611 - RNA, 14 nt, Homo sapiens
agccaggcggcugg

SEQ ID NO: 47612 - RNA, 17 nt, Homo sapiens
agccagguaccuucuca

SEQ ID NO: 47613 - RNA, 18 nt, Homo sapiens
agccagguaccuucucac

SEQ ID NO: 47614 - RNA, 19 nt, Homo sapiens
agccaucggagcugcuaga

SEQ ID NO: 47615 - RNA, 23 nt, Homo sapiens
agccaugugauuacccucugggu

SEQ ID NO: 47616 - RNA, 24 nt, Homo sapiens
agccaugugauuacccucuggguc

SEQ ID NO: 47617 - RNA, 17 nt, Homo sapiens
agcccacuggcucccug

SEQ ID NO: 47618 - RNA, 15 nt, Homo sapiens
agcccauggcacucu

SEQ ID NO: 47619 - RNA, 16 nt, Homo sapiens
agcccauggcacucua

SEQ ID NO: 47620 - RNA, 12 nt, Homo sapiens
agccccaaaagg

SEQ ID NO: 47621 - RNA, 10 nt, Homo sapiens
agccccaggc

SEQ ID NO: 47622 - RNA, 11 nt, Homo sapiens
agccccaggcg

SEQ ID NO: 47623 - RNA, 12 nt, Homo sapiens
agccccaggcgg

SEQ ID NO: 47624 - RNA, 20 nt, Homo sapiens
agccccaggcggguccgggu

SEQ ID NO: 47625 - RNA, 22 nt, Homo sapiens
agccccaggcggguccgggucg

SEQ ID NO: 47626 - RNA, 12 nt, Homo sapiens
agccccgggagu

SEQ ID NO: 47627 - RNA, 17 nt, Homo sapiens
agccccgggaguggcgc

SEQ ID NO: 47628 - RNA, 18 nt, Homo sapiens
agccccgggaguggcgcg

SEQ ID NO: 47629 - RNA, 19 nt, Homo sapiens
agccccgggaguggcgcgc

SEQ ID NO: 47630 - RNA, 18 nt, Homo sapiens
agccccuugggcagguca

SEQ ID NO: 47631 - RNA, 19 nt, Homo sapiens
agccccuugggcaggucac

SEQ ID NO: 47632 - RNA, 17 nt, Homo sapiens
agcccggaaacuccaca

SEQ ID NO: 47633 - RNA, 14 nt, Homo sapiens
agcccucuucugac

SEQ ID NO: 47634 - RNA, 19 nt, Homo sapiens
agcccuuacguccuuccac

SEQ ID NO: 47635 - RNA, 15 nt, Homo sapiens
agccggagccccuug

SEQ ID NO: 47636 - RNA, 11 nt, Homo sapiens
agccggagccu

SEQ ID NO: 47637 - RNA, 12 nt, Homo sapiens
agccggagccuc

SEQ ID NO: 47638 - RNA, 15 nt, Homo sapiens
agccggagccuccag

SEQ ID NO: 47639 - RNA, 16 nt, Homo sapiens
agccggagccuccagc

SEQ ID NO: 47640 - RNA, 18 nt, Homo sapiens
agccggagccuccagcug

SEQ ID NO: 47641 - RNA, 23 nt, Homo sapiens
agccggagccuccagcugccccg

SEQ ID NO: 47642 - RNA, 18 nt, Homo sapiens
agccgggaaagaagagcc

SEQ ID NO: 47643 - RNA, 20 nt, Homo sapiens
agccgggaaagaagagccgg

SEQ ID NO: 47644 - RNA, 21 nt, Homo sapiens
agccgggcaugguggcgcgca

SEQ ID NO: 47645 - RNA, 16 nt, Homo sapiens
agccuaguugaucagc

SEQ ID NO: 47646 - RNA, 14 nt, Homo sapiens
agccucagcucuca

SEQ ID NO: 47647 - RNA, 13 nt, Homo sapiens
agccuccagcugc

SEQ ID NO: 47648 - RNA, 14 nt, Homo sapiens
agccuccagcugcc

SEQ ID NO: 47649 - RNA, 15 nt, Homo sapiens
agccuccagcugccc

SEQ ID NO: 47650 - RNA, 15 nt, Homo sapiens
agccucuauugccau

SEQ ID NO: 47651 - RNA, 16 nt, Homo sapiens
agccucuauugccaug

SEQ ID NO: 47652 - RNA, 17 nt, Homo sapiens
agccucuauugccauga

SEQ ID NO: 47653 - RNA, 19 nt, Homo sapiens
agccucuauugccaugaga

SEQ ID NO: 47654 - RNA, 11 nt, Homo sapiens
agccugaccac

SEQ ID NO: 47655 - RNA, 22 nt, Homo sapiens
agccugccucaaucaguauuca

SEQ ID NO: 47656 - RNA, 18 nt, Homo sapiens
agccuugcuccuggcugg

SEQ ID NO: 47657 - RNA, 23 nt, Homo sapiens
agccuuggggcugaugcaguugu

SEQ ID NO: 47658 - RNA, 24 nt, Homo sapiens
agccuuggggcugaugcaguuguu

SEQ ID NO: 47659 - RNA, 22 nt, Homo sapiens
agccuuuguugcuaucaaucca

SEQ ID NO: 47660 - RNA, 12 nt, Homo sapiens
agcgacagugag

SEQ ID NO: 47661 - RNA, 14 nt, Homo sapiens
agcgagccccaggc

SEQ ID NO: 47662 - RNA, 16 nt, Homo sapiens
agcgagccccaggcgg

SEQ ID NO: 47663 - RNA, 17 nt, Homo sapiens
agcgagccccaggcggg

SEQ ID NO: 47664 - RNA, 21 nt, Homo sapiens
agcgagccccaggcggguccg

SEQ ID NO: 47665 - RNA, 15 nt, Homo sapiens
agcgagggacaccga

SEQ ID NO: 47666 - RNA, 14 nt, Homo sapiens
agcgaguacuuccc

SEQ ID NO: 47667 - RNA, 13 nt, Homo sapiens
agcgcagccaugu

SEQ ID NO: 47668 - RNA, 12 nt, Homo sapiens
agcgcgcgcgcc

SEQ ID NO: 47669 - RNA, 13 nt, Homo sapiens
agcgcgcgcgccc

SEQ ID NO: 47670 - RNA, 14 nt, Homo sapiens
agcgcgcgcgcccu

SEQ ID NO: 47671 - RNA, 17 nt, Homo sapiens
agcggaccuucccagcu

SEQ ID NO: 47672 - RNA, 18 nt, Homo sapiens
agcggaccuucccagcua

SEQ ID NO: 47673 - RNA, 15 nt, Homo sapiens
agcuaagauauaauu

SEQ ID NO: 47674 - RNA, 20 nt, Homo sapiens
agcuaaguugcaccaacuuu

SEQ ID NO: 47675 - RNA, 20 nt, Homo sapiens
agcuacuugggaggcugaga

SEQ ID NO: 47676 - RNA, 19 nt, Homo sapiens
agcuagaaaacaggcaaau

SEQ ID NO: 47677 - RNA, 17 nt, Homo sapiens
agcuagaauucacucca

SEQ ID NO: 47678 - RNA, 18 nt, Homo sapiens
agcuagaauucacuccac

SEQ ID NO: 47679 - RNA, 18 nt, Homo sapiens
agcuagaauuugauaugu

SEQ ID NO: 47680 - RNA, 22 nt, Homo sapiens
agcuaggggggucagccagccc

SEQ ID NO: 47681 - RNA, 11 nt, Homo sapiens
agcucaggcug

SEQ ID NO: 47682 - RNA, 15 nt, Homo sapiens
agcucaggcuggcac

SEQ ID NO: 47683 - RNA, 16 nt, Homo sapiens
agcucaggcuggcacc

SEQ ID NO: 47684 - RNA, 19 nt, Homo sapiens
agcucaggcuggcaccgcu

SEQ ID NO: 47685 - RNA, 23 nt, Homo sapiens
agcuccaccuuacuucuucucau

SEQ ID NO: 47686 - RNA, 13 nt, Homo sapiens
agcucguggaaca

SEQ ID NO: 47687 - RNA, 20 nt, Homo sapiens
agcucuaucccaaccucucc

SEQ ID NO: 47688 - RNA, 15 nt, Homo sapiens
agcucucaguugcag

SEQ ID NO: 47689 - RNA, 17 nt, Homo sapiens
agcucucaguugcagcc

SEQ ID NO: 47690 - RNA, 19 nt, Homo sapiens
agcucucaguugcagcccu

SEQ ID NO: 47691 - RNA, 22 nt, Homo sapiens
agcucucugaccuccuccuuca

SEQ ID NO: 47692 - RNA, 22 nt, Homo sapiens
agcugaauacauucugcuuuca

SEQ ID NO: 47693 - RNA, 19 nt, Homo sapiens
agcugauaucaugccccug

SEQ ID NO: 47694 - RNA, 19 nt, Homo sapiens
agcugccccggggaggggc

SEQ ID NO: 47695 - RNA, 23 nt, Homo sapiens
agcugccuccccagcucuauccc

SEQ ID NO: 47696 - RNA, 14 nt, Homo sapiens
agcugccucucuca

SEQ ID NO: 47697 - RNA, 20 nt, Homo sapiens
agcugccucucucauccacu

SEQ ID NO: 47698 - RNA, 21 nt, Homo sapiens
agcugcugaaacaacaaauag

SEQ ID NO: 47699 - RNA, 16 nt, Homo sapiens
agcuggaaaaguaugu

SEQ ID NO: 47700 - RNA, 17 nt, Homo sapiens
agcuggaaaaguauguu

SEQ ID NO: 47701 - RNA, 12 nt, Homo sapiens
agcuguggccag

SEQ ID NO: 47702 - RNA, 13 nt, Homo sapiens
agcuguggccagc

SEQ ID NO: 47703 - RNA, 19 nt, Homo sapiens
agcuguggccagcuuguua

SEQ ID NO: 47704 - RNA, 13 nt, Homo sapiens
agcuguugagcug

SEQ ID NO: 47705 - RNA, 20 nt, Homo sapiens
agcuguuuaugcauagauaa

SEQ ID NO: 47706 - RNA, 14 nt, Homo sapiens
agcuguuuccauag

SEQ ID NO: 47707 - RNA, 18 nt, Homo sapiens
agcuguuuucccugaccu

SEQ ID NO: 47708 - RNA, 16 nt, Homo sapiens
agcuuauuaaaacuca

SEQ ID NO: 47709 - RNA, 17 nt, Homo sapiens
agcuuauugucuaguga

SEQ ID NO: 47710 - RNA, 19 nt, Homo sapiens
agcuugaaacugagaugug

SEQ ID NO: 47711 - RNA, 22 nt, Homo sapiens
agcuugaaauagugucugauga

SEQ ID NO: 47712 - RNA, 15 nt, Homo sapiens
agcuuucucuaguuc

SEQ ID NO: 47713 - RNA, 22 nt, Homo sapiens
agcuuuucaaaauuggacuuaa

SEQ ID NO: 47714 - RNA, 20 nt, Homo sapiens
aggaaauauucuguaaucuu

SEQ ID NO: 47715 - RNA, 14 nt, Homo sapiens
aggaaauauuuauu

SEQ ID NO: 47716 - RNA, 10 nt, Homo sapiens
aggaacagaa

SEQ ID NO: 47717 - RNA, 15 nt, Homo sapiens
aggaauuguuuuuau

SEQ ID NO: 47718 - RNA, 11 nt, Homo sapiens
aggaccauccc

SEQ ID NO: 47719 - RNA, 14 nt, Homo sapiens
aggaccaucccggc

SEQ ID NO: 47720 - RNA, 15 nt, Homo sapiens
aggaccaucccggcc

SEQ ID NO: 47721 - RNA, 18 nt, Homo sapiens
aggaccaucccggccggc

SEQ ID NO: 47722 - RNA, 20 nt, Homo sapiens
aggaccaucccggccggcgc

SEQ ID NO: 47723 - RNA, 22 nt, Homo sapiens
aggaccaucccggccggcgcgc

SEQ ID NO: 47724 - RNA, 12 nt, Homo sapiens
aggacuguagaa

SEQ ID NO: 47725 - RNA, 13 nt, Homo sapiens
aggacuguagaaa

SEQ ID NO: 47726 - RNA, 22 nt, Homo sapiens
aggacuugggcgggacacaggc

SEQ ID NO: 47727 - RNA, 20 nt, Homo sapiens
aggagauggaaguugcagug

SEQ ID NO: 47728 - RNA, 16 nt, Homo sapiens
aggagauuucaugccu

SEQ ID NO: 47729 - RNA, 12 nt, Homo sapiens
aggagccugcaa

SEQ ID NO: 47730 - RNA, 13 nt, Homo sapiens
aggagccugcaac

SEQ ID NO: 47731 - RNA, 14 nt, Homo sapiens
aggagccugcaaca

SEQ ID NO: 47732 - RNA, 16 nt, Homo sapiens
aggagcucccaggagg

SEQ ID NO: 47733 - RNA, 21 nt, Homo sapiens
aggaggggaaggcaacauaca

SEQ ID NO: 47734 - RNA, 23 nt, Homo sapiens
aggaguuccuaaccagccugguc

SEQ ID NO: 47735 - RNA, 15 nt, Homo sapiens
aggauaagagggauu

SEQ ID NO: 47736 - RNA, 17 nt, Homo sapiens
aggauagagugggacag

SEQ ID NO: 47737 - RNA, 18 nt, Homo sapiens
aggaucugcuuggucuug

SEQ ID NO: 47738 - RNA, 10 nt, Homo sapiens
aggaugcaca

SEQ ID NO: 47739 - RNA, 14 nt, Homo sapiens
aggaugcccacggc

SEQ ID NO: 47740 - RNA, 17 nt, Homo sapiens
aggaugcuuguacauaa

SEQ ID NO: 47741 - RNA, 14 nt, Homo sapiens
aggauggcaggagg

SEQ ID NO: 47742 - RNA, 11 nt, Homo sapiens
aggaugguucc

SEQ ID NO: 47743 - RNA, 13 nt, Homo sapiens
aggcaagagaauu

SEQ ID NO: 47744 - RNA, 19 nt, Homo sapiens
aggcaaggcuaugugauua

SEQ ID NO: 47745 - RNA, 21 nt, Homo sapiens
aggcagagguugcagugagcc

SEQ ID NO: 47746 - RNA, 22 nt, Homo sapiens
aggcagcaggauagagugggac

SEQ ID NO: 47747 - RNA, 16 nt, Homo sapiens
aggcaggggaauguau

SEQ ID NO: 47748 - RNA, 20 nt, Homo sapiens
aggcauacugccuuguuuaa

SEQ ID NO: 47749 - RNA, 19 nt, Homo sapiens
aggcauauuuaacaaaauu

SEQ ID NO: 47750 - RNA, 12 nt, Homo sapiens
aggcaucgccau

SEQ ID NO: 47751 - RNA, 13 nt, Homo sapiens
aggcaucgccauu

SEQ ID NO: 47752 - RNA, 11 nt, Homo sapiens
aggcauguaau

SEQ ID NO: 47753 - RNA, 15 nt, Homo sapiens
aggcauucucugaag

SEQ ID NO: 47754 - RNA, 16 nt, Homo sapiens
aggcauuugcagcugu

SEQ ID NO: 47755 - RNA, 20 nt, Homo sapiens
aggcauuugcagcugugcca

SEQ ID NO: 47756 - RNA, 14 nt, Homo sapiens
aggccaccuggauu

SEQ ID NO: 47757 - RNA, 15 nt, Homo sapiens
aggcccccgggccga

SEQ ID NO: 47758 - RNA, 17 nt, Homo sapiens
aggcccccgggccgacg

SEQ ID NO: 47759 - RNA, 18 nt, Homo sapiens
aggcccccgggccgacgg

SEQ ID NO: 47760 - RNA, 20 nt, Homo sapiens
aggcccccgggccgacggag

SEQ ID NO: 47761 - RNA, 20 nt, Homo sapiens
aggcccugcccuuacaggaa

SEQ ID NO: 47762 - RNA, 20 nt, Homo sapiens
aggccgggcgcgguggcuca

SEQ ID NO: 47763 - RNA, 17 nt, Homo sapiens
aggccugucccugcaga

SEQ ID NO: 47764 - RNA, 22 nt, Homo sapiens
aggcggguccgggucgcaggac

SEQ ID NO: 47765 - RNA, 15 nt, Homo sapiens
aggcuccaaacugga

SEQ ID NO: 47766 - RNA, 18 nt, Homo sapiens
aggcuccugagacacaug

SEQ ID NO: 47767 - RNA, 14 nt, Homo sapiens
aggcugaggcgggu

SEQ ID NO: 47768 - RNA, 10 nt, Homo sapiens
aggcugcaaa

SEQ ID NO: 47769 - RNA, 20 nt, Homo sapiens
aggcuggagugcaguggcgc

SEQ ID NO: 47770 - RNA, 22 nt, Homo sapiens
aggcuggagugcaguggcgcaa

SEQ ID NO: 47771 - RNA, 15 nt, Homo sapiens
aggcuggcaccgcug

SEQ ID NO: 47772 - RNA, 17 nt, Homo sapiens
aggcuggucucgaacug

SEQ ID NO: 47773 - RNA, 17 nt, Homo sapiens
aggcuguggauuuaaug

SEQ ID NO: 47774 - RNA, 20 nt, Homo sapiens
aggcuuagacccucaugcug

SEQ ID NO: 47775 - RNA, 21 nt, Homo sapiens
aggcuuagacccucaugcugc

SEQ ID NO: 47776 - RNA, 16 nt, Homo sapiens
aggcuuuaucucaggg

SEQ ID NO: 47777 - RNA, 21 nt, Homo sapiens
agggaccucuccaugauccca

SEQ ID NO: 47778 - RNA, 13 nt, Homo sapiens
agggaccugcugu

SEQ ID NO: 47779 - RNA, 22 nt, Homo sapiens
agggacuucugucuucacaaca

SEQ ID NO: 47780 - RNA, 15 nt, Homo sapiens
agggacuugaaccca

SEQ ID NO: 47781 - RNA, 17 nt, Homo sapiens
agggauggcaagaugug

SEQ ID NO: 47782 - RNA, 18 nt, Homo sapiens
agggauggcaagaugugg

SEQ ID NO: 47783 - RNA, 19 nt, Homo sapiens
agggauggcaagauguggg

SEQ ID NO: 47784 - RNA, 20 nt, Homo sapiens
agggccuggcugggaguggc

SEQ ID NO: 47785 - RNA, 9 nt, Homo sapiens
agggcgcgg

SEQ ID NO: 47786 - RNA, 12 nt, Homo sapiens
agggcgcggggc

SEQ ID NO: 47787 - RNA, 14 nt, Homo sapiens
agggcgcggggcgg

SEQ ID NO: 47788 - RNA, 18 nt, Homo sapiens
agggcgcggggcggggag

SEQ ID NO: 47789 - RNA, 14 nt, Homo sapiens
agggcuacgcgcgc

SEQ ID NO: 47790 - RNA, 10 nt, Homo sapiens
agggcuugag

SEQ ID NO: 47791 - RNA, 19 nt, Homo sapiens
agggcuugaggacuugggc

SEQ ID NO: 47792 - RNA, 14 nt, Homo sapiens
aggggcaguggugg

SEQ ID NO: 47793 - RNA, 13 nt, Homo sapiens
aggggcgcucgcu

SEQ ID NO: 47794 - RNA, 14 nt, Homo sapiens
aggggcgcucgcuu

SEQ ID NO: 47795 - RNA, 16 nt, Homo sapiens
aggggcgcucgcuucc

SEQ ID NO: 47796 - RNA, 12 nt, Homo sapiens
aggggcggcggc

SEQ ID NO: 47797 - RNA, 15 nt, Homo sapiens
aggggcggcggcccu

SEQ ID NO: 47798 - RNA, 21 nt, Homo sapiens
aggggcggcggcccugugcgg

SEQ ID NO: 47799 - RNA, 17 nt, Homo sapiens
aggggcuuaauuauuga

SEQ ID NO: 47800 - RNA, 14 nt, Homo sapiens
agggggcgcgugca

SEQ ID NO: 47801 - RNA, 16 nt, Homo sapiens
aggggggucagccagc

SEQ ID NO: 47802 - RNA, 17 nt, Homo sapiens
aggguacacugccuucu

SEQ ID NO: 47803 - RNA, 18 nt, Homo sapiens
aggguacacugccuucuc

SEQ ID NO: 47804 - RNA, 22 nt, Homo sapiens
agggucucccucuguugccaag

SEQ ID NO: 47805 - RNA, 15 nt, Homo sapiens
agggugaacugcagc

SEQ ID NO: 47806 - RNA, 17 nt, Homo sapiens
agggugcacacaggaug

SEQ ID NO: 47807 - RNA, 19 nt, Homo sapiens
agguaccagccuuggauac

SEQ ID NO: 47808 - RNA, 23 nt, Homo sapiens
agguaccuucucaccugugagac

SEQ ID NO: 47809 - RNA, 14 nt, Homo sapiens
agguagccaucaug

SEQ ID NO: 47810 - RNA, 19 nt, Homo sapiens
agguauuuauugagcaccu

SEQ ID NO: 47811 - RNA, 19 nt, Homo sapiens
agguauuuuaaucaccaag

SEQ ID NO: 47812 - RNA, 19 nt, Homo sapiens
aggucacagaggaucugcu

SEQ ID NO: 47813 - RNA, 20 nt, Homo sapiens
aggucacagaggaucugcuu

SEQ ID NO: 47814 - RNA, 10 nt, Homo sapiens
aggucauuuu

SEQ ID NO: 47815 - RNA, 9 nt, Homo sapiens
aggugacca

SEQ ID NO: 47816 - RNA, 16 nt, Homo sapiens
aggugacccugaugaa

SEQ ID NO: 47817 - RNA, 18 nt, Homo sapiens
aggugcuacaaaaacaca

SEQ ID NO: 47818 - RNA, 19 nt, Homo sapiens
aggugcuacaaaaacacag

SEQ ID NO: 47819 - RNA, 20 nt, Homo sapiens
aggugcuacaaaaacacagc

SEQ ID NO: 47820 - RNA, 21 nt, Homo sapiens
aggugcuacaaaaacacagca

SEQ ID NO: 47821 - RNA, 16 nt, Homo sapiens
aggugucuugcuggcu

SEQ ID NO: 47822 - RNA, 17 nt, Homo sapiens
aggugucuugcuggcuu

SEQ ID NO: 47823 - RNA, 13 nt, Homo sapiens
agguuaugauuga

SEQ ID NO: 47824 - RNA, 21 nt, Homo sapiens
agguuguuggauaaaucagug

SEQ ID NO: 47825 - RNA, 14 nt, Homo sapiens
agguuuggacaaaa

SEQ ID NO: 47826 - RNA, 18 nt, Homo sapiens
agguuuuuaagccuuaaa

SEQ ID NO: 47827 - RNA, 16 nt, Homo sapiens
aguaaaggcaaacuua

SEQ ID NO: 47828 - RNA, 17 nt, Homo sapiens
aguaacggaacaguauc

SEQ ID NO: 47829 - RNA, 17 nt, Homo sapiens
aguaauaugcacacauu

SEQ ID NO: 47830 - RNA, 19 nt, Homo sapiens
aguaauaugcacacauuuu

SEQ ID NO: 47831 - RNA, 12 nt, Homo sapiens
aguacagacuuu

SEQ ID NO: 47832 - RNA, 13 nt, Homo sapiens
aguacagacuuuu

SEQ ID NO: 47833 - RNA, 14 nt, Homo sapiens
aguaccucugcuau

SEQ ID NO: 47834 - RNA, 17 nt, Homo sapiens
aguacguugugcauuug

SEQ ID NO: 47835 - RNA, 18 nt, Homo sapiens
aguacguugugcauuugg

SEQ ID NO: 47836 - RNA, 14 nt, Homo sapiens
aguagauuaagaga

SEQ ID NO: 47837 - RNA, 12 nt, Homo sapiens
aguagcagcagc

SEQ ID NO: 47838 - RNA, 14 nt, Homo sapiens
aguaguuagcuuuc

SEQ ID NO: 47839 - RNA, 22 nt, Homo sapiens
aguauaaauaaaaugagcaaaa

SEQ ID NO: 47840 - RNA, 20 nt, Homo sapiens
aguaucagcuacaauuguaa

SEQ ID NO: 47841 - RNA, 18 nt, Homo sapiens
aguaucccuacuguaauu

SEQ ID NO: 47842 - RNA, 18 nt, Homo sapiens
aguaucugacaucucugc

SEQ ID NO: 47843 - RNA, 16 nt, Homo sapiens
aguaugaaaaugucau

SEQ ID NO: 47844 - RNA, 18 nt, Homo sapiens
aguaugaaaaugucauug

SEQ ID NO: 47845 - RNA, 16 nt, Homo sapiens
aguaugaggcauuugu

SEQ ID NO: 47846 - RNA, 22 nt, Homo sapiens
aguaugcacuaaucaauacuuu

SEQ ID NO: 47847 - RNA, 13 nt, Homo sapiens
aguaugugcauuu

SEQ ID NO: 47848 - RNA, 18 nt, Homo sapiens
agucaaggcuuagacccu

SEQ ID NO: 47849 - RNA, 18 nt, Homo sapiens
agucacuaguuguaauuu

SEQ ID NO: 47850 - RNA, 14 nt, Homo sapiens
agucagaagaccug

SEQ ID NO: 47851 - RNA, 17 nt, Homo sapiens
agucagucauucagaua

SEQ ID NO: 47852 - RNA, 16 nt, Homo sapiens
agucauucagauauga

SEQ ID NO: 47853 - RNA, 17 nt, Homo sapiens
agucauucagauaugau

SEQ ID NO: 47854 - RNA, 16 nt, Homo sapiens
agucauucugccugcc

SEQ ID NO: 47855 - RNA, 17 nt, Homo sapiens
agucauucugccugccc

SEQ ID NO: 47856 - RNA, 20 nt, Homo sapiens
agucccagaucaagccugcc

SEQ ID NO: 47857 - RNA, 22 nt, Homo sapiens
agucucuaucauuaaaguucua

SEQ ID NO: 47858 - RNA, 23 nt, Homo sapiens
agucucuaucauuaaaguucuag

SEQ ID NO: 47859 - RNA, 12 nt, Homo sapiens
agucuguuuuau

SEQ ID NO: 47860 - RNA, 13 nt, Homo sapiens
agucuguuuuaug

SEQ ID NO: 47861 - RNA, 20 nt, Homo sapiens
agucuucagcagagaaguuu

SEQ ID NO: 47862 - RNA, 16 nt, Homo sapiens
agucuuguauuaaguu

SEQ ID NO: 47863 - RNA, 15 nt, Homo sapiens
agugaaaaacaucca

SEQ ID NO: 47864 - RNA, 20 nt, Homo sapiens
agugaaaaucuacacuccag

SEQ ID NO: 47865 - RNA, 20 nt, Homo sapiens
agugaacaaauuuacagaga

SEQ ID NO: 47866 - RNA, 19 nt, Homo sapiens
agugacaagcucacagacc

SEQ ID NO: 47867 - RNA, 15 nt, Homo sapiens
agugacauguuuaca

SEQ ID NO: 47868 - RNA, 22 nt, Homo sapiens
agugacauguuuacaaaccuca

SEQ ID NO: 47869 - RNA, 23 nt, Homo sapiens
agugacauguuuacaaaccucaa

SEQ ID NO: 47870 - RNA, 13 nt, Homo sapiens
agugauccgccca

SEQ ID NO: 47871 - RNA, 13 nt, Homo sapiens
agugcaguggcgc

SEQ ID NO: 47872 - RNA, 14 nt, Homo sapiens
agugcaguggcgca

SEQ ID NO: 47873 - RNA, 13 nt, Homo sapiens
agugcuuggccca

SEQ ID NO: 47874 - RNA, 15 nt, Homo sapiens
agugcuuggcccagg

SEQ ID NO: 47875 - RNA, 19 nt, Homo sapiens
agugcuuggcccaggaguu

SEQ ID NO: 47876 - RNA, 14 nt, Homo sapiens
aguggcauguauga

SEQ ID NO: 47877 - RNA, 16 nt, Homo sapiens
aguggcgcgcgccacc

SEQ ID NO: 47878 - RNA, 19 nt, Homo sapiens
aguggcgcgcgccaccacg

SEQ ID NO: 47879 - RNA, 21 nt, Homo sapiens
aguggcgcgcgccaccacgcc

SEQ ID NO: 47880 - RNA, 22 nt, Homo sapiens
aguggcgcgcgccaccacgccc

SEQ ID NO: 47881 - RNA, 14 nt, Homo sapiens
aguggguuucacaa

SEQ ID NO: 47882 - RNA, 22 nt, Homo sapiens
agugguuauuuagggaacugcu

SEQ ID NO: 47883 - RNA, 15 nt, Homo sapiens
aguguaaguucacaa

SEQ ID NO: 47884 - RNA, 16 nt, Homo sapiens
agugucaaugcagccc

SEQ ID NO: 47885 - RNA, 23 nt, Homo sapiens
aguguccucaucuguaaaaugga

SEQ ID NO: 47886 - RNA, 16 nt, Homo sapiens
agugucugaugaaugu

SEQ ID NO: 47887 - RNA, 15 nt, Homo sapiens
agugugacucauuaa

SEQ ID NO: 47888 - RNA, 20 nt, Homo sapiens
aguguuggaaaaugugcaau

SEQ ID NO: 47889 - RNA, 21 nt, Homo sapiens
aguguuggaaaaugugcaaua

SEQ ID NO: 47890 - RNA, 12 nt, Homo sapiens
aguguuggagaa

SEQ ID NO: 47891 - RNA, 12 nt, Homo sapiens
aguguuuagcau

SEQ ID NO: 47892 - RNA, 16 nt, Homo sapiens
aguuaagcaacaucua

SEQ ID NO: 47893 - RNA, 17 nt, Homo sapiens
aguuacugccgguuuga

SEQ ID NO: 47894 - RNA, 15 nt, Homo sapiens
aguuauuuuuaaacu

SEQ ID NO: 47895 - RNA, 17 nt, Homo sapiens
aguuauuuuuaauuugg

SEQ ID NO: 47896 - RNA, 16 nt, Homo sapiens
aguucaaguucaccag

SEQ ID NO: 47897 - RNA, 21 nt, Homo sapiens
aguucaauccugauucauauu

SEQ ID NO: 47898 - RNA, 17 nt, Homo sapiens
aguucaccagacucuau

SEQ ID NO: 47899 - RNA, 19 nt, Homo sapiens
aguuccuaaccagccuggu

SEQ ID NO: 47900 - RNA, 18 nt, Homo sapiens
aguuccugagaccagcca

SEQ ID NO: 47901 - RNA, 15 nt, Homo sapiens
aguuccuucugcucc

SEQ ID NO: 47902 - RNA, 22 nt, Homo sapiens
aguucuacuccauuaaauauaa

SEQ ID NO: 47903 - RNA, 15 nt, Homo sapiens
aguucuagugaccga

SEQ ID NO: 47904 - RNA, 20 nt, Homo sapiens
aguucuaugagggcuaauau

SEQ ID NO: 47905 - RNA, 15 nt, Homo sapiens
aguucugaagaagau

SEQ ID NO: 47906 - RNA, 24 nt, Homo sapiens
aguucugaagaagaugguaccacc

SEQ ID NO: 47907 - RNA, 15 nt, Homo sapiens
aguucugucuggacu

SEQ ID NO: 47908 - RNA, 20 nt, Homo sapiens
aguucugucuggacuuucca

SEQ ID NO: 47909 - RNA, 17 nt, Homo sapiens
aguucuucaaagauagg

SEQ ID NO: 47910 - RNA, 15 nt, Homo sapiens
aguugaauuuuacau

SEQ ID NO: 47911 - RNA, 16 nt, Homo sapiens
aguugauaugccuuuu

SEQ ID NO: 47912 - RNA, 14 nt, Homo sapiens
aguugauuuuacaa

SEQ ID NO: 47913 - RNA, 13 nt, Homo sapiens
aguugcuguaugu

SEQ ID NO: 47914 - RNA, 23 nt, Homo sapiens
aguuguaccgcaaugugacuuaa

SEQ ID NO: 47915 - RNA, 13 nt, Homo sapiens
aguuuauauagaa

SEQ ID NO: 47916 - RNA, 14 nt, Homo sapiens
aguuuauauagaaa

SEQ ID NO: 47917 - RNA, 22 nt, Homo sapiens
aguuuauauagaaauguauucu

SEQ ID NO: 47918 - RNA, 22 nt, Homo sapiens
aguuuggccagaagucaaggcu

SEQ ID NO: 47919 - RNA, 21 nt, Homo sapiens
aguuuuauaugcuucuguuuu

SEQ ID NO: 47920 - RNA, 23 nt, Homo sapiens
aguuuuccuucucaucugugauu

SEQ ID NO: 47921 - RNA, 19 nt, Homo sapiens
aguuuuggaaacguauuca

SEQ ID NO: 47922 - RNA, 14 nt, Homo sapiens
auaaaacuuuucca

SEQ ID NO: 47923 - RNA, 19 nt, Homo sapiens
auaaaacuuuuccaaugac

SEQ ID NO: 47924 - RNA, 13 nt, Homo sapiens
auaaaagcacuua

SEQ ID NO: 47925 - RNA, 15 nt, Homo sapiens
auaaaauauuuaaaa

SEQ ID NO: 47926 - RNA, 18 nt, Homo sapiens
auaaaauccauacauuug

SEQ ID NO: 47927 - RNA, 19 nt, Homo sapiens
auaaaauccauacauuugu

SEQ ID NO: 47928 - RNA, 18 nt, Homo sapiens
auaaaauucauuccauuu

SEQ ID NO: 47929 - RNA, 17 nt, Homo sapiens
auaaaauuuuuauguaa

SEQ ID NO: 47930 - RNA, 18 nt, Homo sapiens
auaaacaagaccacguuu

SEQ ID NO: 47931 - RNA, 19 nt, Homo sapiens
auaaacgucuuaaauauuc

SEQ ID NO: 47932 - RNA, 16 nt, Homo sapiens
auaaacucagaaauuu

SEQ ID NO: 47933 - RNA, 20 nt, Homo sapiens
auaaagcacuguuuggauau

SEQ ID NO: 47934 - RNA, 14 nt, Homo sapiens
auaaagcagcguuu

SEQ ID NO: 47935 - RNA, 18 nt, Homo sapiens
auaaauaucuagaaauga

SEQ ID NO: 47936 - RNA, 20 nt, Homo sapiens
auaaauucccuggccuuuca

SEQ ID NO: 47937 - RNA, 9 nt, Homo sapiens
auaaauuug

SEQ ID NO: 47938 - RNA, 23 nt, Homo sapiens
auaaauuuucuucuugguucuga

SEQ ID NO: 47939 - RNA, 22 nt, Homo sapiens
auaaccaugcccaagaaugaga

SEQ ID NO: 47940 - RNA, 22 nt, Homo sapiens
auaacuaggcguggacuuacua

SEQ ID NO: 47941 - RNA, 12 nt, Homo sapiens
auaacuguuauu

SEQ ID NO: 47942 - RNA, 21 nt, Homo sapiens
auaacuuuuuuuuaaguuaca

SEQ ID NO: 47943 - RNA, 17 nt, Homo sapiens
auaagcaaagacuauga

SEQ ID NO: 47944 - RNA, 22 nt, Homo sapiens
auaagcuuguauuccuuuuucu

SEQ ID NO: 47945 - RNA, 22 nt, Homo sapiens
auaagugaagugauacuaucca

SEQ ID NO: 47946 - RNA, 16 nt, Homo sapiens
auaauacuagucuuau

SEQ ID NO: 47947 - RNA, 16 nt, Homo sapiens
auaauaugagaaucag

SEQ ID NO: 47948 - RNA, 22 nt, Homo sapiens
auaauuccuauauccugugacu

SEQ ID NO: 47949 - RNA, 16 nt, Homo sapiens
auaauuuuagacauuc

SEQ ID NO: 47950 - RNA, 22 nt, Homo sapiens
auaauuuugugaagcaaaauuu

SEQ ID NO: 47951 - RNA, 23 nt, Homo sapiens
auaauuuugugaagcaaaauuuu

SEQ ID NO: 47952 - RNA, 22 nt, Homo sapiens
auaauuuuuauauuugaaauau

SEQ ID NO: 47953 - RNA, 12 nt, Homo sapiens
auacaaucauca

SEQ ID NO: 47954 - RNA, 16 nt, Homo sapiens
auacaaucaucaaccc

SEQ ID NO: 47955 - RNA, 17 nt, Homo sapiens
auacaaucaucaacccc

SEQ ID NO: 47956 - RNA, 19 nt, Homo sapiens
auacaauuauuuuuacagu

SEQ ID NO: 47957 - RNA, 22 nt, Homo sapiens
auacaauuauuuuuacaguucu

SEQ ID NO: 47958 - RNA, 12 nt, Homo sapiens
auacacacucaa

SEQ ID NO: 47959 - RNA, 18 nt, Homo sapiens
auacaccagagauaauau

SEQ ID NO: 47960 - RNA, 12 nt, Homo sapiens
auacauaaacaa

SEQ ID NO: 47961 - RNA, 13 nt, Homo sapiens
auacauaaacaag

SEQ ID NO: 47962 - RNA, 17 nt, Homo sapiens
auacauaaacaagacca

SEQ ID NO: 47963 - RNA, 19 nt, Homo sapiens
auacauuauuggacuucca

SEQ ID NO: 47964 - RNA, 20 nt, Homo sapiens
auacauuauuggacuuccau

SEQ ID NO: 47965 - RNA, 16 nt, Homo sapiens
auacauucugcuuuca

SEQ ID NO: 47966 - RNA, 15 nt, Homo sapiens
auaccacaggaacca

SEQ ID NO: 47967 - RNA, 15 nt, Homo sapiens
auacguacacauuuu

SEQ ID NO: 47968 - RNA, 20 nt, Homo sapiens
auacgugggcauucaaaugu

SEQ ID NO: 47969 - RNA, 13 nt, Homo sapiens
auacuaauaaaau

SEQ ID NO: 47970 - RNA, 12 nt, Homo sapiens
auacuacaguuu

SEQ ID NO: 47971 - RNA, 13 nt, Homo sapiens
auacuacaguuug

SEQ ID NO: 47972 - RNA, 14 nt, Homo sapiens
auacuacaguuugu

SEQ ID NO: 47973 - RNA, 15 nt, Homo sapiens
auacuauccaguuac

SEQ ID NO: 47974 - RNA, 14 nt, Homo sapiens
auacuauuuaauua

SEQ ID NO: 47975 - RNA, 21 nt, Homo sapiens
auacuauuuaauuauuucacu

SEQ ID NO: 47976 - RNA, 23 nt, Homo sapiens
auacuauuuaauuauuucacuuu

SEQ ID NO: 47977 - RNA, 24 nt, Homo sapiens
auacuauuuaauuauuucacuuua

SEQ ID NO: 47978 - RNA, 18 nt, Homo sapiens
auacugaaauaaacgucu

SEQ ID NO: 47979 - RNA, 23 nt, Homo sapiens
auacugccuuguuuaauguuaau

SEQ ID NO: 47980 - RNA, 16 nt, Homo sapiens
auacuguauuuuuacc

SEQ ID NO: 47981 - RNA, 18 nt, Homo sapiens
auacuguuugagguuuuu

SEQ ID NO: 47982 - RNA, 17 nt, Homo sapiens
auacuucaauacuucau

SEQ ID NO: 47983 - RNA, 21 nt, Homo sapiens
auacuucuuaggguuaugauu

SEQ ID NO: 47984 - RNA, 17 nt, Homo sapiens
auagaagguuugcagau

SEQ ID NO: 47985 - RNA, 17 nt, Homo sapiens
auagaauuaacacauga

SEQ ID NO: 47986 - RNA, 13 nt, Homo sapiens
auagacaauuuau

SEQ ID NO: 47987 - RNA, 13 nt, Homo sapiens
auagacucuagga

SEQ ID NO: 47988 - RNA, 12 nt, Homo sapiens
auagcaagugaa

SEQ ID NO: 47989 - RNA, 17 nt, Homo sapiens
auagcagcuuauucaca

SEQ ID NO: 47990 - RNA, 14 nt, Homo sapiens
auagcaucucagga

SEQ ID NO: 47991 - RNA, 20 nt, Homo sapiens
auagccagguaccuucucac

SEQ ID NO: 47992 - RNA, 21 nt, Homo sapiens
auagccagguaccuucucacc

SEQ ID NO: 47993 - RNA, 21 nt, Homo sapiens
auagcuaagauauaauuuaaa

SEQ ID NO: 47994 - RNA, 23 nt, Homo sapiens
auaggaaauauuuuaauguuucu

SEQ ID NO: 47995 - RNA, 20 nt, Homo sapiens
auaggugcuacaaaaacaca

SEQ ID NO: 47996 - RNA, 21 nt, Homo sapiens
auagugucugaugaauguuaa

SEQ ID NO: 47997 - RNA, 16 nt, Homo sapiens
auaguguuggaaaaug

SEQ ID NO: 47998 - RNA, 23 nt, Homo sapiens
auaguguuggaaaaugugcaaua

SEQ ID NO: 47999 - RNA, 15 nt, Homo sapiens
auaguuguaccgcaa

SEQ ID NO: 48000 - RNA, 19 nt, Homo sapiens
auauaaaaauaaagcacuu

SEQ ID NO: 48001 - RNA, 13 nt, Homo sapiens
auauaaauuuauc

SEQ ID NO: 48002 - RNA, 20 nt, Homo sapiens
auauaauaugcacacagugc

SEQ ID NO: 48003 - RNA, 14 nt, Homo sapiens
auauauauuuuuuu

SEQ ID NO: 48004 - RNA, 20 nt, Homo sapiens
auauauguguuuuucacauu

SEQ ID NO: 48005 - RNA, 17 nt, Homo sapiens
auauauuuccuuauuca

SEQ ID NO: 48006 - RNA, 13 nt, Homo sapiens
auauauuuuuaga

SEQ ID NO: 48007 - RNA, 13 nt, Homo sapiens
auauauuuuuuuu

SEQ ID NO: 48008 - RNA, 14 nt, Homo sapiens
auauauuuuuuuuu

SEQ ID NO: 48009 - RNA, 15 nt, Homo sapiens
auauauuuuuuuuuu

SEQ ID NO: 48010 - RNA, 16 nt, Homo sapiens
auauauuuuuuuuuuu

SEQ ID NO: 48011 - RNA, 19 nt, Homo sapiens
auauauuuuuuuuuuuaaa

SEQ ID NO: 48012 - RNA, 20 nt, Homo sapiens
auauauuuuuuuuuuuaaaa

SEQ ID NO: 48013 - RNA, 18 nt, Homo sapiens
auaucaguuauuuuuaaa

SEQ ID NO: 48014 - RNA, 23 nt, Homo sapiens
auauccuaauaaaaaggugacca

SEQ ID NO: 48015 - RNA, 21 nt, Homo sapiens
auauccuuagcccaucuuuca

SEQ ID NO: 48016 - RNA, 22 nt, Homo sapiens
auauccuuagcccaucuuucaa

SEQ ID NO: 48017 - RNA, 18 nt, Homo sapiens
auaucuaauauauaugaa

SEQ ID NO: 48018 - RNA, 18 nt, Homo sapiens
auaucuagaaaugauaau

SEQ ID NO: 48019 - RNA, 17 nt, Homo sapiens
auaucuauauuuuacau

SEQ ID NO: 48020 - RNA, 20 nt, Homo sapiens
auaucuccgucaacucauau

SEQ ID NO: 48021 - RNA, 21 nt, Homo sapiens
auaucuccgucaacucauauu

SEQ ID NO: 48022 - RNA, 15 nt, Homo sapiens
auaugacacaucucu

SEQ ID NO: 48023 - RNA, 13 nt, Homo sapiens
auaugauucaaau

SEQ ID NO: 48024 - RNA, 20 nt, Homo sapiens
auaugcuucuguuuuauaau

SEQ ID NO: 48025 - RNA, 16 nt, Homo sapiens
auauguaacaacaauu

SEQ ID NO: 48026 - RNA, 12 nt, Homo sapiens
auaugugaaaua

SEQ ID NO: 48027 - RNA, 12 nt, Homo sapiens
auauuagcuuua

SEQ ID NO: 48028 - RNA, 18 nt, Homo sapiens
auauucauucuuuuugaa

SEQ ID NO: 48029 - RNA, 15 nt, Homo sapiens
auauugacuuuuuau

SEQ ID NO: 48030 - RNA, 16 nt, Homo sapiens
auauugauaauaaaau

SEQ ID NO: 48031 - RNA, 21 nt, Homo sapiens
auauuuaacaaaauuugaaua

SEQ ID NO: 48032 - RNA, 14 nt, Homo sapiens
auauuuaauuugaa

SEQ ID NO: 48033 - RNA, 21 nt, Homo sapiens
auauuuauugauguuuucaca

SEQ ID NO: 48034 - RNA, 16 nt, Homo sapiens
auauuuccaagaaaua

SEQ ID NO: 48035 - RNA, 11 nt, Homo sapiens
auauuuccuua

SEQ ID NO: 48036 - RNA, 12 nt, Homo sapiens
auauuugaaaua

SEQ ID NO: 48037 - RNA, 21 nt, Homo sapiens
auauuugaauuuuaaaucuaa

SEQ ID NO: 48038 - RNA, 15 nt, Homo sapiens
auauuuuacauaaau

SEQ ID NO: 48039 - RNA, 18 nt, Homo sapiens
auauuuuuaugugcaaua

SEQ ID NO: 48040 - RNA, 19 nt, Homo sapiens
auauuuuuaugugcaauaa

SEQ ID NO: 48041 - RNA, 22 nt, Homo sapiens
auauuuuuuguuaaaugauuuc

SEQ ID NO: 48042 - RNA, 15 nt, Homo sapiens
auauuuuuuuuuuua

SEQ ID NO: 48043 - RNA, 16 nt, Homo sapiens
auauuuuuuuuuuuaa

SEQ ID NO: 48044 - RNA, 17 nt, Homo sapiens
auauuuuuuuuuuuaaa

SEQ ID NO: 48045 - RNA, 16 nt, Homo sapiens
aucaaauaugcaaagc

SEQ ID NO: 48046 - RNA, 16 nt, Homo sapiens
aucaaccaaauggagu

SEQ ID NO: 48047 - RNA, 19 nt, Homo sapiens
aucaauagaaggauguaca

SEQ ID NO: 48048 - RNA, 10 nt, Homo sapiens
aucaauaucu

SEQ ID NO: 48049 - RNA, 17 nt, Homo sapiens
aucaauccaagaacuua

SEQ ID NO: 48050 - RNA, 14 nt, Homo sapiens
aucaaugaaugaau

SEQ ID NO: 48051 - RNA, 21 nt, Homo sapiens
aucaauucuauuacgugcaau

SEQ ID NO: 48052 - RNA, 22 nt, Homo sapiens
aucaauucuauuacgugcaaua

SEQ ID NO: 48053 - RNA, 18 nt, Homo sapiens
aucacaguuuugguugcu

SEQ ID NO: 48054 - RNA, 23 nt, Homo sapiens
aucacaguuuugguugcuuuaau

SEQ ID NO: 48055 - RNA, 14 nt, Homo sapiens
aucaccaaggcuga

SEQ ID NO: 48056 - RNA, 13 nt, Homo sapiens
aucacuugaaccc

SEQ ID NO: 48057 - RNA, 23 nt, Homo sapiens
aucacuugaacccgggaggcaga

SEQ ID NO: 48058 - RNA, 15 nt, Homo sapiens
aucagcauuuuacua

SEQ ID NO: 48059 - RNA, 21 nt, Homo sapiens
aucagccuaguugaucagcuu

SEQ ID NO: 48060 - RNA, 15 nt, Homo sapiens
aucaggcuggccaac

SEQ ID NO: 48061 - RNA, 17 nt, Homo sapiens
aucaggcuggccaacgg

SEQ ID NO: 48062 - RNA, 20 nt, Homo sapiens
aucaggguuaguauugucca

SEQ ID NO: 48063 - RNA, 15 nt, Homo sapiens
aucaguaugaaaaug

SEQ ID NO: 48064 - RNA, 16 nt, Homo sapiens
aucaguaugaaaaugu

SEQ ID NO: 48065 - RNA, 17 nt, Homo sapiens
aucaguccaaagggcau

SEQ ID NO: 48066 - RNA, 15 nt, Homo sapiens
aucaguuacucugaa

SEQ ID NO: 48067 - RNA, 15 nt, Homo sapiens
aucaguuauuuuuaa

SEQ ID NO: 48068 - RNA, 13 nt, Homo sapiens
aucauaugggaua

SEQ ID NO: 48069 - RNA, 15 nt, Homo sapiens
aucaucacccagcac

SEQ ID NO: 48070 - RNA, 17 nt, Homo sapiens
aucaugaauuaguuuua

SEQ ID NO: 48071 - RNA, 20 nt, Homo sapiens
aucaugccccuguacuccag

SEQ ID NO: 48072 - RNA, 13 nt, Homo sapiens
aucauguauuuau

SEQ ID NO: 48073 - RNA, 13 nt, Homo sapiens
aucauuaaaguuc

SEQ ID NO: 48074 - RNA, 16 nt, Homo sapiens
aucauuaaaguucuag

SEQ ID NO: 48075 - RNA, 20 nt, Homo sapiens
aucauuuacuuuuaaacuuu

SEQ ID NO: 48076 - RNA, 21 nt, Homo sapiens
aucauuucaaaacucauuucc

SEQ ID NO: 48077 - RNA, 17 nt, Homo sapiens
auccaaagcugaauaca

SEQ ID NO: 48078 - RNA, 16 nt, Homo sapiens
auccacacugagcuga

SEQ ID NO: 48079 - RNA, 19 nt, Homo sapiens
auccacuuuccaauaaaga

SEQ ID NO: 48080 - RNA, 16 nt, Homo sapiens
auccagaaauaaugaa

SEQ ID NO: 48081 - RNA, 17 nt, Homo sapiens
auccaguuacugccggu

SEQ ID NO: 48082 - RNA, 14 nt, Homo sapiens
auccauacauuugu

SEQ ID NO: 48083 - RNA, 17 nt, Homo sapiens
aucccacccgcccaccg

SEQ ID NO: 48084 - RNA, 20 nt, Homo sapiens
auccccguguuacugccuau

SEQ ID NO: 48085 - RNA, 14 nt, Homo sapiens
aucccggccggcgc

SEQ ID NO: 48086 - RNA, 17 nt, Homo sapiens
aucccggccggcgcgcu

SEQ ID NO: 48087 - RNA, 19 nt, Homo sapiens
aucccggccggcgcgcuca

SEQ ID NO: 48088 - RNA, 22 nt, Homo sapiens
auccgcccaucuccgucuccca

SEQ ID NO: 48089 - RNA, 19 nt, Homo sapiens
auccuaauaaaaaggugac

SEQ ID NO: 48090 - RNA, 21 nt, Homo sapiens
auccuaauaaaaaggugacca

SEQ ID NO: 48091 - RNA, 22 nt, Homo sapiens
auccuaauaaaaaggugaccau

SEQ ID NO: 48092 - RNA, 13 nt, Homo sapiens
auccuccuccugc

SEQ ID NO: 48093 - RNA, 23 nt, Homo sapiens
auccugauucauauuuaauuuga

SEQ ID NO: 48094 - RNA, 19 nt, Homo sapiens
auccugcaauuccacuuau

SEQ ID NO: 48095 - RNA, 15 nt, Homo sapiens
auccuggaauaucuc

SEQ ID NO: 48096 - RNA, 16 nt, Homo sapiens
auccuggaauaucucc

SEQ ID NO: 48097 - RNA, 14 nt, Homo sapiens
auccuucagccuga

SEQ ID NO: 48098 - RNA, 15 nt, Homo sapiens
auccuucagccugaa

SEQ ID NO: 48099 - RNA, 23 nt, Homo sapiens
aucggaucuggggcucugggaua

SEQ ID NO: 48100 - RNA, 21 nt, Homo sapiens
aucgucacugcuuaacuucac

SEQ ID NO: 48101 - RNA, 12 nt, Homo sapiens
aucuacacucca

SEQ ID NO: 48102 - RNA, 17 nt, Homo sapiens
aucuacacuccagugag

SEQ ID NO: 48103 - RNA, 15 nt, Homo sapiens
aucuauauuuuacau

SEQ ID NO: 48104 - RNA, 13 nt, Homo sapiens
aucuauuuauuaa

SEQ ID NO: 48105 - RNA, 12 nt, Homo sapiens
aucucaauauuu

SEQ ID NO: 48106 - RNA, 18 nt, Homo sapiens
aucucacaagcacuuucc

SEQ ID NO: 48107 - RNA, 19 nt, Homo sapiens
aucucacaagcacuuuccc

SEQ ID NO: 48108 - RNA, 17 nt, Homo sapiens
aucucauuuaauccucu

SEQ ID NO: 48109 - RNA, 14 nt, Homo sapiens
aucuccgucaacuc

SEQ ID NO: 48110 - RNA, 17 nt, Homo sapiens
aucugacaucucugcaa

SEQ ID NO: 48111 - RNA, 19 nt, Homo sapiens
aucugacaucucugcaauc

SEQ ID NO: 48112 - RNA, 14 nt, Homo sapiens
aucugcuaugcuau

SEQ ID NO: 48113 - RNA, 18 nt, Homo sapiens
aucuguaaaauggagaca

SEQ ID NO: 48114 - RNA, 22 nt, Homo sapiens
aucuguaaaauggagacaccac

SEQ ID NO: 48115 - RNA, 14 nt, Homo sapiens
aucuuacugaaggu

SEQ ID NO: 48116 - RNA, 14 nt, Homo sapiens
aucuucacuuuuau

SEQ ID NO: 48117 - RNA, 22 nt, Homo sapiens
aucuucacuuuuauaagaaaua

SEQ ID NO: 48118 - RNA, 22 nt, Homo sapiens
aucuucucagaaggcaaaugac

SEQ ID NO: 48119 - RNA, 16 nt, Homo sapiens
aucuucuuucaugaag

SEQ ID NO: 48120 - RNA, 15 nt, Homo sapiens
aucuugucucugggc

SEQ ID NO: 48121 - RNA, 15 nt, Homo sapiens
aucuuguuuuuccac

SEQ ID NO: 48122 - RNA, 22 nt, Homo sapiens
aucuuguuuuuccacuacugcu

SEQ ID NO: 48123 - RNA, 23 nt, Homo sapiens
aucuuguuuuuccacuacugcua

SEQ ID NO: 48124 - RNA, 24 nt, Homo sapiens
aucuuguuuuuccacuacugcuac

SEQ ID NO: 48125 - RNA, 21 nt, Homo sapiens
aucuuuaaaauacacacucaa

SEQ ID NO: 48126 - RNA, 15 nt, Homo sapiens
aucuuuauaguucua

SEQ ID NO: 48127 - RNA, 19 nt, Homo sapiens
aucuuuauaguucuacucc

SEQ ID NO: 48128 - RNA, 20 nt, Homo sapiens
aucuuucaagggaccucucc

SEQ ID NO: 48129 - RNA, 22 nt, Homo sapiens
aucuuucaagggaccucuccau

SEQ ID NO: 48130 - RNA, 11 nt, Homo sapiens
aucuuucacau

SEQ ID NO: 48131 - RNA, 18 nt, Homo sapiens
augaaaagauuaugaucu

SEQ ID NO: 48132 - RNA, 20 nt, Homo sapiens
augaaaagauuaugaucuca

SEQ ID NO: 48133 - RNA, 14 nt, Homo sapiens
augaaaaugaauau

SEQ ID NO: 48134 - RNA, 13 nt, Homo sapiens
augaaaaugucau

SEQ ID NO: 48135 - RNA, 20 nt, Homo sapiens
augaacacuuauaagugaag

SEQ ID NO: 48136 - RNA, 14 nt, Homo sapiens
augaagauacugaa

SEQ ID NO: 48137 - RNA, 17 nt, Homo sapiens
augaagauacugaaaua

SEQ ID NO: 48138 - RNA, 17 nt, Homo sapiens
augaaggggcggcggcc

SEQ ID NO: 48139 - RNA, 20 nt, Homo sapiens
augaaggggcggcggcccug

SEQ ID NO: 48140 - RNA, 17 nt, Homo sapiens
augaaguacucauacau

SEQ ID NO: 48141 - RNA, 15 nt, Homo sapiens
augaaguccaagcau

SEQ ID NO: 48142 - RNA, 16 nt, Homo sapiens
augaauaaaguguaag

SEQ ID NO: 48143 - RNA, 13 nt, Homo sapiens
augaauaucaguu

SEQ ID NO: 48144 - RNA, 18 nt, Homo sapiens
augaauuaaguuuuuuuu

SEQ ID NO: 48145 - RNA, 22 nt, Homo sapiens
augaauuaaguuuuuuuuuaaa

SEQ ID NO: 48146 - RNA, 19 nt, Homo sapiens
augaauuuuuuucaucuuc

SEQ ID NO: 48147 - RNA, 14 nt, Homo sapiens
augacaaagacuga

SEQ ID NO: 48148 - RNA, 13 nt, Homo sapiens
augacacaucucu

SEQ ID NO: 48149 - RNA, 21 nt, Homo sapiens
augacccccaucccauggggg

SEQ ID NO: 48150 - RNA, 13 nt, Homo sapiens
augaccuggccgc

SEQ ID NO: 48151 - RNA, 14 nt, Homo sapiens
augacgugacuggc

SEQ ID NO: 48152 - RNA, 21 nt, Homo sapiens
augacgugacuggccugcugg

SEQ ID NO: 48153 - RNA, 22 nt, Homo sapiens
augacgugacuggccugcugga

SEQ ID NO: 48154 - RNA, 14 nt, Homo sapiens
augacuuacuguac

SEQ ID NO: 48155 - RNA, 15 nt, Homo sapiens
augacuucauuaaua

SEQ ID NO: 48156 - RNA, 20 nt, Homo sapiens
augagaaucagaucauuuca

SEQ ID NO: 48157 - RNA, 13 nt, Homo sapiens
augagagacacac

SEQ ID NO: 48158 - RNA, 13 nt, Homo sapiens
augagaucauugu

SEQ ID NO: 48159 - RNA, 17 nt, Homo sapiens
augagccuuuguugcua

SEQ ID NO: 48160 - RNA, 15 nt, Homo sapiens
augauaacuggaaac

SEQ ID NO: 48161 - RNA, 13 nt, Homo sapiens
augauccugcaau

SEQ ID NO: 48162 - RNA, 11 nt, Homo sapiens
augauguuuca

SEQ ID NO: 48163 - RNA, 11 nt, Homo sapiens
augauguuucg

SEQ ID NO: 48164 - RNA, 14 nt, Homo sapiens
augauucaaauguc

SEQ ID NO: 48165 - RNA, 15 nt, Homo sapiens
augauuucacagugu

SEQ ID NO: 48166 - RNA, 16 nt, Homo sapiens
augauuucacagugug

SEQ ID NO: 48167 - RNA, 13 nt, Homo sapiens
augauuucauuca

SEQ ID NO: 48168 - RNA, 14 nt, Homo sapiens
augcaaagcacuga

SEQ ID NO: 48169 - RNA, 24 nt, Homo sapiens
augcaaccuuuggaugcacuuuau

SEQ ID NO: 48170 - RNA, 13 nt, Homo sapiens
augcacacauuuu

SEQ ID NO: 48171 - RNA, 14 nt, Homo sapiens
augcacacauuuuu

SEQ ID NO: 48172 - RNA, 22 nt, Homo sapiens
augcacagaguuguuacauuuu

SEQ ID NO: 48173 - RNA, 23 nt, Homo sapiens
augcacagaguuguuacauuuuu

SEQ ID NO: 48174 - RNA, 19 nt, Homo sapiens
augcaguucugaagaagau

SEQ ID NO: 48175 - RNA, 20 nt, Homo sapiens
augcaucuuacugaagguaa

SEQ ID NO: 48176 - RNA, 21 nt, Homo sapiens
augcaugaaguaauaugcaca

SEQ ID NO: 48177 - RNA, 16 nt, Homo sapiens
augcauuugcacuauu

SEQ ID NO: 48178 - RNA, 17 nt, Homo sapiens
augccaaguuguuugag

SEQ ID NO: 48179 - RNA, 19 nt, Homo sapiens
augccacuaaauugacacu

SEQ ID NO: 48180 - RNA, 19 nt, Homo sapiens
augccagccacugugauag

SEQ ID NO: 48181 - RNA, 14 nt, Homo sapiens
augccccagggacc

SEQ ID NO: 48182 - RNA, 19 nt, Homo sapiens
augccuggugcuuccaaau

SEQ ID NO: 48183 - RNA, 17 nt, Homo sapiens
augcuaauuuuauuaua

SEQ ID NO: 48184 - RNA, 13 nt, Homo sapiens
augcuauuuauua

SEQ ID NO: 48185 - RNA, 14 nt, Homo sapiens
augcuauuuauuaa

SEQ ID NO: 48186 - RNA, 17 nt, Homo sapiens
augcucuccaaaccacu

SEQ ID NO: 48187 - RNA, 16 nt, Homo sapiens
augcugagcccggaaa

SEQ ID NO: 48188 - RNA, 23 nt, Homo sapiens
augcugagcccggaaacuccaca

SEQ ID NO: 48189 - RNA, 14 nt, Homo sapiens
augcuggccaggcu

SEQ ID NO: 48190 - RNA, 15 nt, Homo sapiens
augcuggccaggcug

SEQ ID NO: 48191 - RNA, 13 nt, Homo sapiens
augcuguauuuua

SEQ ID NO: 48192 - RNA, 22 nt, Homo sapiens
augcuguauuuuaaaagaauga

SEQ ID NO: 48193 - RNA, 22 nt, Homo sapiens
augcuuaugaaacuaagauuug

SEQ ID NO: 48194 - RNA, 17 nt, Homo sapiens
augcuucuguuuuauaa

SEQ ID NO: 48195 - RNA, 15 nt, Homo sapiens
augcuuguacauaau

SEQ ID NO: 48196 - RNA, 18 nt, Homo sapiens
augcuuguauuuuacuuu

SEQ ID NO: 48197 - RNA, 20 nt, Homo sapiens
augcuuuaaacauugguucu

SEQ ID NO: 48198 - RNA, 20 nt, Homo sapiens
auggaauuucucccagucau

SEQ ID NO: 48199 - RNA, 12 nt, Homo sapiens
auggagacacca

SEQ ID NO: 48200 - RNA, 15 nt, Homo sapiens
auggagacaccacca

SEQ ID NO: 48201 - RNA, 16 nt, Homo sapiens
auggagacaccaccac

SEQ ID NO: 48202 - RNA, 18 nt, Homo sapiens
auggagacaccaccaccc

SEQ ID NO: 48203 - RNA, 17 nt, Homo sapiens
auggagguuaagcacuu

SEQ ID NO: 48204 - RNA, 14 nt, Homo sapiens
auggagugacuuag

SEQ ID NO: 48205 - RNA, 13 nt, Homo sapiens
auggcaagaugug

SEQ ID NO: 48206 - RNA, 14 nt, Homo sapiens
auggcaagaugugg

SEQ ID NO: 48207 - RNA, 17 nt, Homo sapiens
auggcacuaguauuucu

SEQ ID NO: 48208 - RNA, 18 nt, Homo sapiens
auggcacuaguauuucua

SEQ ID NO: 48209 - RNA, 20 nt, Homo sapiens
auggcaggaggcauccaaag

SEQ ID NO: 48210 - RNA, 17 nt, Homo sapiens
auggcaggcaucgccau

SEQ ID NO: 48211 - RNA, 22 nt, Homo sapiens
auggccagugagaucaauguga

SEQ ID NO: 48212 - RNA, 16 nt, Homo sapiens
auggcuaguaucaaaa

SEQ ID NO: 48213 - RNA, 12 nt, Homo sapiens
auggcuuccugg

SEQ ID NO: 48214 - RNA, 22 nt, Homo sapiens
auggcuuccuggcaauagucaa

SEQ ID NO: 48215 - RNA, 15 nt, Homo sapiens
auggcuuuugugcau

SEQ ID NO: 48216 - RNA, 13 nt, Homo sapiens
augggacauuugc

SEQ ID NO: 48217 - RNA, 21 nt, Homo sapiens
augggacauuugcucauggaa

SEQ ID NO: 48218 - RNA, 19 nt, Homo sapiens
augggagaaucacuugaac

SEQ ID NO: 48219 - RNA, 19 nt, Homo sapiens
augggcuuucccaacagcu

SEQ ID NO: 48220 - RNA, 16 nt, Homo sapiens
augggggugcauuuga

SEQ ID NO: 48221 - RNA, 19 nt, Homo sapiens
augguaguuuuacaguguu

SEQ ID NO: 48222 - RNA, 13 nt, Homo sapiens
augguauuaaaga

SEQ ID NO: 48223 - RNA, 21 nt, Homo sapiens
auggucggaaaacaugcuaca

SEQ ID NO: 48224 - RNA, 14 nt, Homo sapiens
auggugguauguuu

SEQ ID NO: 48225 - RNA, 19 nt, Homo sapiens
augguuccauucucucucc

SEQ ID NO: 48226 - RNA, 18 nt, Homo sapiens
augguuuaaauggucaau

SEQ ID NO: 48227 - RNA, 13 nt, Homo sapiens
auguaacugcauu

SEQ ID NO: 48228 - RNA, 17 nt, Homo sapiens
auguaauuauauauacu

SEQ ID NO: 48229 - RNA, 22 nt, Homo sapiens
auguacauccauggugugcugg

SEQ ID NO: 48230 - RNA, 21 nt, Homo sapiens
auguagaauauauuuccuuau

SEQ ID NO: 48231 - RNA, 18 nt, Homo sapiens
auguagauaaacucagaa

SEQ ID NO: 48232 - RNA, 17 nt, Homo sapiens
auguagauaaagcacug

SEQ ID NO: 48233 - RNA, 14 nt, Homo sapiens
auguagcagcucau

SEQ ID NO: 48234 - RNA, 16 nt, Homo sapiens
auguagcagcucauaa

SEQ ID NO: 48235 - RNA, 18 nt, Homo sapiens
auguauguacuucaugcu

SEQ ID NO: 48236 - RNA, 19 nt, Homo sapiens
augucauuguucuugugaa

SEQ ID NO: 48237 - RNA, 15 nt, Homo sapiens
augugacggcaggga

SEQ ID NO: 48238 - RNA, 17 nt, Homo sapiens
augugauauguaccuaa

SEQ ID NO: 48239 - RNA, 20 nt, Homo sapiens
augugauuacccucuggguc

SEQ ID NO: 48240 - RNA, 10 nt, Homo sapiens
augugcaaua

SEQ ID NO: 48241 - RNA, 11 nt, Homo sapiens
augugcaauaa

SEQ ID NO: 48242 - RNA, 11 nt, Homo sapiens
augugcaauau

SEQ ID NO: 48243 - RNA, 20 nt, Homo sapiens
augugcauauuuuauuauag

SEQ ID NO: 48244 - RNA, 23 nt, Homo sapiens
augugcuuuuaaaaaaaaauacu

SEQ ID NO: 48245 - RNA, 21 nt, Homo sapiens
auguggagggggcgcgugcag

SEQ ID NO: 48246 - RNA, 15 nt, Homo sapiens
auguguaagacaaaa

SEQ ID NO: 48247 - RNA, 22 nt, Homo sapiens
augugucaggugacccugauga

SEQ ID NO: 48248 - RNA, 17 nt, Homo sapiens
auguuaaaacugggaca

SEQ ID NO: 48249 - RNA, 17 nt, Homo sapiens
auguuagagaauuuccu

SEQ ID NO: 48250 - RNA, 18 nt, Homo sapiens
auguuagagaauuuccuu

SEQ ID NO: 48251 - RNA, 20 nt, Homo sapiens
auguuagagaauuuccuuac

SEQ ID NO: 48252 - RNA, 16 nt, Homo sapiens
auguugacaugggaca

SEQ ID NO: 48253 - RNA, 16 nt, Homo sapiens
auguuuagcagauuua

SEQ ID NO: 48254 - RNA, 17 nt, Homo sapiens
auguuuagcagauuuaa

SEQ ID NO: 48255 - RNA, 19 nt, Homo sapiens
auguuuagcagauuuaaga

SEQ ID NO: 48256 - RNA, 23 nt, Homo sapiens
auguuucaaacauauauaacaau

SEQ ID NO: 48257 - RNA, 15 nt, Homo sapiens
auguuucgcugauau

SEQ ID NO: 48258 - RNA, 23 nt, Homo sapiens
auguuucgugaaguauacuguau

SEQ ID NO: 48259 - RNA, 14 nt, Homo sapiens
auguuucuugggga

SEQ ID NO: 48260 - RNA, 22 nt, Homo sapiens
auguuugccgcuuaagcuuuca

SEQ ID NO: 48261 - RNA, 10 nt, Homo sapiens
auguuuucaa

SEQ ID NO: 48262 - RNA, 19 nt, Homo sapiens
auguuuucaggcuagaugu

SEQ ID NO: 48263 - RNA, 13 nt, Homo sapiens
auuaaagaucugc

SEQ ID NO: 48264 - RNA, 14 nt, Homo sapiens
auuaaaguucuagu

SEQ ID NO: 48265 - RNA, 15 nt, Homo sapiens
auuaaaguucuagug

SEQ ID NO: 48266 - RNA, 16 nt, Homo sapiens
auuaaaguucuaguga

SEQ ID NO: 48267 - RNA, 12 nt, Homo sapiens
auuaaauaaaau

SEQ ID NO: 48268 - RNA, 20 nt, Homo sapiens
auuaaauggaaguaaauguu

SEQ ID NO: 48269 - RNA, 20 nt, Homo sapiens
auuaacuuuuauaaacuuua

SEQ ID NO: 48270 - RNA, 15 nt, Homo sapiens
auuaaggauuuuaug

SEQ ID NO: 48271 - RNA, 15 nt, Homo sapiens
auuaaggcuucucuu

SEQ ID NO: 48272 - RNA, 15 nt, Homo sapiens
auuaaggguaugauu

SEQ ID NO: 48273 - RNA, 13 nt, Homo sapiens
auuaaguaaugau

SEQ ID NO: 48274 - RNA, 21 nt, Homo sapiens
auuaaguuuuuuuuuaaaaaa

SEQ ID NO: 48275 - RNA, 12 nt, Homo sapiens
auuaauucaccu

SEQ ID NO: 48276 - RNA, 19 nt, Homo sapiens
auuacaaggcuuuaucuca

SEQ ID NO: 48277 - RNA, 16 nt, Homo sapiens
auuacaggcgugagcc

SEQ ID NO: 48278 - RNA, 17 nt, Homo sapiens
auuacaggcgugagcca

SEQ ID NO: 48279 - RNA, 18 nt, Homo sapiens
auuacaggcgugagccac

SEQ ID NO: 48280 - RNA, 14 nt, Homo sapiens
auuacaucuuucac

SEQ ID NO: 48281 - RNA, 18 nt, Homo sapiens
auuacauuuguauaaaau

SEQ ID NO: 48282 - RNA, 13 nt, Homo sapiens
auuacgugcaaua

SEQ ID NO: 48283 - RNA, 19 nt, Homo sapiens
auuacgugcaauacuucaa

SEQ ID NO: 48284 - RNA, 20 nt, Homo sapiens
auuacuguaagaaaauauca

SEQ ID NO: 48285 - RNA, 21 nt, Homo sapiens
auuacuguaagaaaauaucac

SEQ ID NO: 48286 - RNA, 11 nt, Homo sapiens
auuagccgggc

SEQ ID NO: 48287 - RNA, 12 nt, Homo sapiens
auuagccgggca

SEQ ID NO: 48288 - RNA, 12 nt, Homo sapiens
auuagccgggcg

SEQ ID NO: 48289 - RNA, 19 nt, Homo sapiens
auuagugaaguaugcacua

SEQ ID NO: 48290 - RNA, 13 nt, Homo sapiens
auuauagaaugga

SEQ ID NO: 48291 - RNA, 15 nt, Homo sapiens
auuauauuuauuacu

SEQ ID NO: 48292 - RNA, 13 nt, Homo sapiens
auuaucaugcaaa

SEQ ID NO: 48293 - RNA, 18 nt, Homo sapiens
auuaucuagauacuguau

SEQ ID NO: 48294 - RNA, 21 nt, Homo sapiens
auuauucccauucuacauacu

SEQ ID NO: 48295 - RNA, 16 nt, Homo sapiens
auuauuugaagauuua

SEQ ID NO: 48296 - RNA, 19 nt, Homo sapiens
auuauuugaagauuuaauu

SEQ ID NO: 48297 - RNA, 20 nt, Homo sapiens
auuauuugaagauuuaauua

SEQ ID NO: 48298 - RNA, 19 nt, Homo sapiens
auuauuuuagagcaucuca

SEQ ID NO: 48299 - RNA, 20 nt, Homo sapiens
auuauuuuagagcaucucau

SEQ ID NO: 48300 - RNA, 14 nt, Homo sapiens
auucaaaaguugaa

SEQ ID NO: 48301 - RNA, 11 nt, Homo sapiens
auucaaaugua

SEQ ID NO: 48302 - RNA, 18 nt, Homo sapiens
auucaaauguauuacagu

SEQ ID NO: 48303 - RNA, 23 nt, Homo sapiens
auucagaauuucuaaaaguuuaa

SEQ ID NO: 48304 - RNA, 12 nt, Homo sapiens
auucaggaugcc

SEQ ID NO: 48305 - RNA, 14 nt, Homo sapiens
auucauauuuaauu

SEQ ID NO: 48306 - RNA, 20 nt, Homo sapiens
auucauauuuauagccaggu

SEQ ID NO: 48307 - RNA, 14 nt, Homo sapiens
auucauuccauuug

SEQ ID NO: 48308 - RNA, 23 nt, Homo sapiens
auucauucuuuuugaaaugucaa

SEQ ID NO: 48309 - RNA, 17 nt, Homo sapiens
auuccaacuaucucauu

SEQ ID NO: 48310 - RNA, 14 nt, Homo sapiens
auuccaagccugac

SEQ ID NO: 48311 - RNA, 13 nt, Homo sapiens
auucccauucuac

SEQ ID NO: 48312 - RNA, 16 nt, Homo sapiens
auucccuccugcuacu

SEQ ID NO: 48313 - RNA, 12 nt, Homo sapiens
auuccuauaucc

SEQ ID NO: 48314 - RNA, 15 nt, Homo sapiens
auuccucacuuugaa

SEQ ID NO: 48315 - RNA, 16 nt, Homo sapiens
auucgauccccuguca

SEQ ID NO: 48316 - RNA, 14 nt, Homo sapiens
auucuauguuaaua

SEQ ID NO: 48317 - RNA, 18 nt, Homo sapiens
auucuauuacgugcaaua

SEQ ID NO: 48318 - RNA, 19 nt, Homo sapiens
auucuauuacgugcaauac

SEQ ID NO: 48319 - RNA, 21 nt, Homo sapiens
auucugagguaaccucauuau

SEQ ID NO: 48320 - RNA, 23 nt, Homo sapiens
auucugagguaaccucauuauca

SEQ ID NO: 48321 - RNA, 17 nt, Homo sapiens
auucugcaagcuuuuca

SEQ ID NO: 48322 - RNA, 14 nt, Homo sapiens
auucuuccucccau

SEQ ID NO: 48323 - RNA, 15 nt, Homo sapiens
auucuuccucccauu

SEQ ID NO: 48324 - RNA, 21 nt, Homo sapiens
auucuuccucccauucaggau

SEQ ID NO: 48325 - RNA, 14 nt, Homo sapiens
auucuuuaucacau

SEQ ID NO: 48326 - RNA, 13 nt, Homo sapiens
auucuuuuaguuu

SEQ ID NO: 48327 - RNA, 19 nt, Homo sapiens
auucuuuuugaaaugucaa

SEQ ID NO: 48328 - RNA, 16 nt, Homo sapiens
auugaaaugauuucac

SEQ ID NO: 48329 - RNA, 21 nt, Homo sapiens
auugaaucccuuaaacucagg

SEQ ID NO: 48330 - RNA, 18 nt, Homo sapiens
auugacuauagugugagc

SEQ ID NO: 48331 - RNA, 15 nt, Homo sapiens
auugagaacugcaua

SEQ ID NO: 48332 - RNA, 14 nt, Homo sapiens
auugagaaggagcu

SEQ ID NO: 48333 - RNA, 16 nt, Homo sapiens
auugagcaccugcagg

SEQ ID NO: 48334 - RNA, 14 nt, Homo sapiens
auugcaaccuccac

SEQ ID NO: 48335 - RNA, 13 nt, Homo sapiens
auugcauuuaauu

SEQ ID NO: 48336 - RNA, 17 nt, Homo sapiens
auugcauuuaauuuauu

SEQ ID NO: 48337 - RNA, 18 nt, Homo sapiens
auugcauuuaauuuauug

SEQ ID NO: 48338 - RNA, 15 nt, Homo sapiens
auugcuaucgccauc

SEQ ID NO: 48339 - RNA, 23 nt, Homo sapiens
auuggacuuaaaaucuaauucaa

SEQ ID NO: 48340 - RNA, 18 nt, Homo sapiens
auuggagcucgugggaca

SEQ ID NO: 48341 - RNA, 18 nt, Homo sapiens
auuggcuagagguucaaa

SEQ ID NO: 48342 - RNA, 17 nt, Homo sapiens
auugguugggcugagca

SEQ ID NO: 48343 - RNA, 13 nt, Homo sapiens
auugguuuaccug

SEQ ID NO: 48344 - RNA, 17 nt, Homo sapiens
auuguaacuuaugaacc

SEQ ID NO: 48345 - RNA, 14 nt, Homo sapiens
auugucuagugaaa

SEQ ID NO: 48346 - RNA, 14 nt, Homo sapiens
auugugggcucugg

SEQ ID NO: 48347 - RNA, 12 nt, Homo sapiens
auuguugacaac

SEQ ID NO: 48348 - RNA, 17 nt, Homo sapiens
auuguugacaacuguga

SEQ ID NO: 48349 - RNA, 18 nt, Homo sapiens
auuguugacaacugugac

SEQ ID NO: 48350 - RNA, 15 nt, Homo sapiens
auuuaaagacaaaga

SEQ ID NO: 48351 - RNA, 23 nt, Homo sapiens
auuuaaauagcuuuuuucucuga

SEQ ID NO: 48352 - RNA, 22 nt, Homo sapiens
auuuaaccucuaaauucuuuca

SEQ ID NO: 48353 - RNA, 17 nt, Homo sapiens
auuuaagagaacaagca

SEQ ID NO: 48354 - RNA, 13 nt, Homo sapiens
auuuaagauaugu

SEQ ID NO: 48355 - RNA, 15 nt, Homo sapiens
auuuaauccucucaa

SEQ ID NO: 48356 - RNA, 22 nt, Homo sapiens
auuuaauuacuucuuaguaugu

SEQ ID NO: 48357 - RNA, 18 nt, Homo sapiens
auuuacggaacucaaaua

SEQ ID NO: 48358 - RNA, 19 nt, Homo sapiens
auuuacggaacucaaauac

SEQ ID NO: 48359 - RNA, 18 nt, Homo sapiens
auuuaguauuuuguuuca

SEQ ID NO: 48360 - RNA, 16 nt, Homo sapiens
auuuaucauuuaguua

SEQ ID NO: 48361 - RNA, 17 nt, Homo sapiens
auuuauuaccucugaua

SEQ ID NO: 48362 - RNA, 18 nt, Homo sapiens
auuuauugaaaugauuuc

SEQ ID NO: 48363 - RNA, 19 nt, Homo sapiens
auuuauugaaaugauuuca

SEQ ID NO: 48364 - RNA, 21 nt, Homo sapiens
auuuauugaaaugauuucaca

SEQ ID NO: 48365 - RNA, 14 nt, Homo sapiens
auuuauugagcacc

SEQ ID NO: 48366 - RNA, 18 nt, Homo sapiens
auuuauugagcaccugca

SEQ ID NO: 48367 - RNA, 14 nt, Homo sapiens
auuuauuuauucau

SEQ ID NO: 48368 - RNA, 11 nt, Homo sapiens
auuuauuuuaa

SEQ ID NO: 48369 - RNA, 12 nt, Homo sapiens
auuuauuuuaau

SEQ ID NO: 48370 - RNA, 13 nt, Homo sapiens
auuuauuuuaaua

SEQ ID NO: 48371 - RNA, 17 nt, Homo sapiens
auuuauuuuuuuacuuc

SEQ ID NO: 48372 - RNA, 20 nt, Homo sapiens
auuuauuuuuuuacuuccuc

SEQ ID NO: 48373 - RNA, 14 nt, Homo sapiens
auuucacuugauga

SEQ ID NO: 48374 - RNA, 21 nt, Homo sapiens
auuucauaccuaucaucuuaa

SEQ ID NO: 48375 - RNA, 16 nt, Homo sapiens
auuuccaaauucacaa

SEQ ID NO: 48376 - RNA, 22 nt, Homo sapiens
auuuccaagaaauauuccuuaa

SEQ ID NO: 48377 - RNA, 16 nt, Homo sapiens
auuuccaagcaaguau

SEQ ID NO: 48378 - RNA, 20 nt, Homo sapiens
auuuccguuaaaauaccagc

SEQ ID NO: 48379 - RNA, 18 nt, Homo sapiens
auuucuaaaucuccaaaa

SEQ ID NO: 48380 - RNA, 23 nt, Homo sapiens
auuucuaaaucuccaaaauaaaa

SEQ ID NO: 48381 - RNA, 13 nt, Homo sapiens
auuucuaugaaau

SEQ ID NO: 48382 - RNA, 14 nt, Homo sapiens
auuucuaugaaaua

SEQ ID NO: 48383 - RNA, 22 nt, Homo sapiens
auuucugaggagccugcaacau

SEQ ID NO: 48384 - RNA, 15 nt, Homo sapiens
auuucugcaucagcu

SEQ ID NO: 48385 - RNA, 13 nt, Homo sapiens
auuucugcuuuca

SEQ ID NO: 48386 - RNA, 22 nt, Homo sapiens
auuucuuuugccguuauuaaaa

SEQ ID NO: 48387 - RNA, 21 nt, Homo sapiens
auuugaaauauugacuuuuua

SEQ ID NO: 48388 - RNA, 13 nt, Homo sapiens
auuugaauauaaa

SEQ ID NO: 48389 - RNA, 14 nt, Homo sapiens
auuugaauauaaau

SEQ ID NO: 48390 - RNA, 21 nt, Homo sapiens
auuugaauauaaauuuaucau

SEQ ID NO: 48391 - RNA, 22 nt, Homo sapiens
auuugaauauaaauuuaucauu

SEQ ID NO: 48392 - RNA, 11 nt, Homo sapiens
auuugagacag

SEQ ID NO: 48393 - RNA, 14 nt, Homo sapiens
auuugagacaggga

SEQ ID NO: 48394 - RNA, 21 nt, Homo sapiens
auuugagcucuggaagccucu

SEQ ID NO: 48395 - RNA, 17 nt, Homo sapiens
auuugccaauuuacuuu

SEQ ID NO: 48396 - RNA, 19 nt, Homo sapiens
auuugcuguuauuuuaucu

SEQ ID NO: 48397 - RNA, 11 nt, Homo sapiens
auuugguucua

SEQ ID NO: 48398 - RNA, 15 nt, Homo sapiens
auuugguuuucacau

SEQ ID NO: 48399 - RNA, 13 nt, Homo sapiens
auuuguauaaaau

SEQ ID NO: 48400 - RNA, 24 nt, Homo sapiens
auuuguuugcauaggugaucucau

SEQ ID NO: 48401 - RNA, 13 nt, Homo sapiens
auuuuacauaaau

SEQ ID NO: 48402 - RNA, 14 nt, Homo sapiens
auuuuacauaaauu

SEQ ID NO: 48403 - RNA, 21 nt, Homo sapiens
auuuuagagcaucucauuuau

SEQ ID NO: 48404 - RNA, 15 nt, Homo sapiens
auuuuagcuacuaua

SEQ ID NO: 48405 - RNA, 13 nt, Homo sapiens
auuuuaggucaaa

SEQ ID NO: 48406 - RNA, 14 nt, Homo sapiens
auuuuaggucaaac

SEQ ID NO: 48407 - RNA, 15 nt, Homo sapiens
auuuuaucugcuaug

SEQ ID NO: 48408 - RNA, 15 nt, Homo sapiens
auuuuaugcuuuaaa

SEQ ID NO: 48409 - RNA, 18 nt, Homo sapiens
auuuuauuacaucuuuca

SEQ ID NO: 48410 - RNA, 13 nt, Homo sapiens
auuuucaccuguu

SEQ ID NO: 48411 - RNA, 19 nt, Homo sapiens
auuuucaugcuguucauga

SEQ ID NO: 48412 - RNA, 15 nt, Homo sapiens
auuuuccugaaaacc

SEQ ID NO: 48413 - RNA, 12 nt, Homo sapiens
auuuucuuccaa

SEQ ID NO: 48414 - RNA, 20 nt, Homo sapiens
auuuuguguucaguacaauu

SEQ ID NO: 48415 - RNA, 22 nt, Homo sapiens
auuuuguuuuuaaacuggaaau

SEQ ID NO: 48416 - RNA, 21 nt, Homo sapiens
auuuuuaaacuguaaagcuuu

SEQ ID NO: 48417 - RNA, 12 nt, Homo sapiens
auuuuuauauuu

SEQ ID NO: 48418 - RNA, 18 nt, Homo sapiens
auuuuucagauauaaaag

SEQ ID NO: 48419 - RNA, 23 nt, Homo sapiens
auuuuuccccaaaaagaauggga

SEQ ID NO: 48420 - RNA, 17 nt, Homo sapiens
auuuuucucaauguuua

SEQ ID NO: 48421 - RNA, 16 nt, Homo sapiens
auuuuucucuaacuca

SEQ ID NO: 48422 - RNA, 12 nt, Homo sapiens
auuuuuguaauu

SEQ ID NO: 48423 - RNA, 22 nt, Homo sapiens
auuuuuguaauuuuuuuaucgu

SEQ ID NO: 48424 - RNA, 22 nt, Homo sapiens
auuuuuguuuucauuaucucaa

SEQ ID NO: 48425 - RNA, 23 nt, Homo sapiens
auuuuuuuacuaauagacaauuu

SEQ ID NO: 48426 - RNA, 22 nt, Homo sapiens
auuuuuuugugggaaauccaca

SEQ ID NO: 48427 - RNA, 12 nt, Homo sapiens
auuuuuuuucug

SEQ ID NO: 48428 - RNA, 17 nt, Homo sapiens
auuuuuuuucuguuaua

SEQ ID NO: 48429 - RNA, 22 nt, Homo sapiens
caaaaacacagcaagggugaug

SEQ ID NO: 48430 - RNA, 23 nt, Homo sapiens
caaaaacacagcaagggugaugg

SEQ ID NO: 48431 - RNA, 16 nt, Homo sapiens
caaaaauuagccgggc

SEQ ID NO: 48432 - RNA, 17 nt, Homo sapiens
caaaaauuagccgggca

SEQ ID NO: 48433 - RNA, 20 nt, Homo sapiens
caaaaauuauauuuugaaca

SEQ ID NO: 48434 - RNA, 20 nt, Homo sapiens
caaaacugauacccuuugaa

SEQ ID NO: 48435 - RNA, 17 nt, Homo sapiens
caaaacugcacugucaa

SEQ ID NO: 48436 - RNA, 17 nt, Homo sapiens
caaaacuucagacauag

SEQ ID NO: 48437 - RNA, 15 nt, Homo sapiens
caaaaucaaauucca

SEQ ID NO: 48438 - RNA, 15 nt, Homo sapiens
caaaauugggaaagg

SEQ ID NO: 48439 - RNA, 23 nt, Homo sapiens
caaacaaacgaaaaacauuucaa

SEQ ID NO: 48440 - RNA, 16 nt, Homo sapiens
caaacagucucaggaa

SEQ ID NO: 48441 - RNA, 22 nt, Homo sapiens
caaaccagagccugaguguugc

SEQ ID NO: 48442 - RNA, 15 nt, Homo sapiens
caaacccggccugau

SEQ ID NO: 48443 - RNA, 17 nt, Homo sapiens
caaaccucugugagcau

SEQ ID NO: 48444 - RNA, 19 nt, Homo sapiens
caaacgaaaaacauuucaa

SEQ ID NO: 48445 - RNA, 21 nt, Homo sapiens
caaagacaaauucuguuucuu

SEQ ID NO: 48446 - RNA, 19 nt, Homo sapiens
caaagaugaucaguaugaa

SEQ ID NO: 48447 - RNA, 17 nt, Homo sapiens
caaaggcuccugagaca

SEQ ID NO: 48448 - RNA, 12 nt, Homo sapiens
caaagugcuggg

SEQ ID NO: 48449 - RNA, 11 nt, Homo sapiens
caaagugugac

SEQ ID NO: 48450 - RNA, 19 nt, Homo sapiens
caaaguuaagaaucuuuau

SEQ ID NO: 48451 - RNA, 20 nt, Homo sapiens
caaaguuaagaaucuuuaua

SEQ ID NO: 48452 - RNA, 22 nt, Homo sapiens
caaauaaguauuuauaauagca

SEQ ID NO: 48453 - RNA, 20 nt, Homo sapiens
caaauacgugggcauucaaa

SEQ ID NO: 48454 - RNA, 15 nt, Homo sapiens
caaauaugcaaagca

SEQ ID NO: 48455 - RNA, 21 nt, Homo sapiens
caaauaugcaaagcacugacu

SEQ ID NO: 48456 - RNA, 16 nt, Homo sapiens
caaauauuguugacaa

SEQ ID NO: 48457 - RNA, 23 nt, Homo sapiens
caaauccuugaagauuuaccacu

SEQ ID NO: 48458 - RNA, 13 nt, Homo sapiens
caaaucucuauua

SEQ ID NO: 48459 - RNA, 18 nt, Homo sapiens
caaaucuuaacuugaagg

SEQ ID NO: 48460 - RNA, 16 nt, Homo sapiens
caaaugacccccaucc

SEQ ID NO: 48461 - RNA, 17 nt, Homo sapiens
caaauguucaucaauga

SEQ ID NO: 48462 - RNA, 12 nt, Homo sapiens
caaauucacaag

SEQ ID NO: 48463 - RNA, 12 nt, Homo sapiens
caaauuccagaa

SEQ ID NO: 48464 - RNA, 22 nt, Homo sapiens
caaauucgcugcaaccuguuga

SEQ ID NO: 48465 - RNA, 17 nt, Homo sapiens
caaauugagcuaggggg

SEQ ID NO: 48466 - RNA, 18 nt, Homo sapiens
caaauugagcuagggggg

SEQ ID NO: 48467 - RNA, 22 nt, Homo sapiens
caacaauuauuugaagauuuaa

SEQ ID NO: 48468 - RNA, 11 nt, Homo sapiens
caacacgagca

SEQ ID NO: 48469 - RNA, 13 nt, Homo sapiens
caacacgagcagg

SEQ ID NO: 48470 - RNA, 14 nt, Homo sapiens
caacacgagcaggc

SEQ ID NO: 48471 - RNA, 23 nt, Homo sapiens
caacacgagcaggcuacugucag

SEQ ID NO: 48472 - RNA, 22 nt, Homo sapiens
caacauacacaccccggacucc

SEQ ID NO: 48473 - RNA, 19 nt, Homo sapiens
caacaugccagccacugug

SEQ ID NO: 48474 - RNA, 14 nt, Homo sapiens
caaccaccuuucag

SEQ ID NO: 48475 - RNA, 15 nt, Homo sapiens
caaccacucauucaa

SEQ ID NO: 48476 - RNA, 18 nt, Homo sapiens
caaccacucauucaaaag

SEQ ID NO: 48477 - RNA, 19 nt, Homo sapiens
caacccaaauguucaucaa

SEQ ID NO: 48478 - RNA, 18 nt, Homo sapiens
caaccuccaccuucuggg

SEQ ID NO: 48479 - RNA, 21 nt, Homo sapiens
caacuauaaaacuaggugcug

SEQ ID NO: 48480 - RNA, 20 nt, Homo sapiens
caacuauauuaucaugcaaa

SEQ ID NO: 48481 - RNA, 14 nt, Homo sapiens
caacuauauuguuu

SEQ ID NO: 48482 - RNA, 18 nt, Homo sapiens
caacuggggugggugggg

SEQ ID NO: 48483 - RNA, 20 nt, Homo sapiens
caacugggguggguggggca

SEQ ID NO: 48484 - RNA, 13 nt, Homo sapiens
caacugugacugu

SEQ ID NO: 48485 - RNA, 18 nt, Homo sapiens
caagaaaauggccaguga

SEQ ID NO: 48486 - RNA, 23 nt, Homo sapiens
caagaaaauggccagugagauca

SEQ ID NO: 48487 - RNA, 19 nt, Homo sapiens
caagaaaugaaagcaggga

SEQ ID NO: 48488 - RNA, 12 nt, Homo sapiens
caagaacuuauu

SEQ ID NO: 48489 - RNA, 13 nt, Homo sapiens
caagacaaaugac

SEQ ID NO: 48490 - RNA, 10 nt, Homo sapiens
caagacauag

SEQ ID NO: 48491 - RNA, 16 nt, Homo sapiens
caagaccacguuucua

SEQ ID NO: 48492 - RNA, 15 nt, Homo sapiens
caagacccaaaaggc

SEQ ID NO: 48493 - RNA, 17 nt, Homo sapiens
caagacugcacaucaaa

SEQ ID NO: 48494 - RNA, 11 nt, Homo sapiens
caagcacuuuc

SEQ ID NO: 48495 - RNA, 13 nt, Homo sapiens
caagcacuuuccc

SEQ ID NO: 48496 - RNA, 21 nt, Homo sapiens
caagcaggcucaacauaacau

SEQ ID NO: 48497 - RNA, 13 nt, Homo sapiens
caagcauuuagau

SEQ ID NO: 48498 - RNA, 17 nt, Homo sapiens
caagcauuuagauguau

SEQ ID NO: 48499 - RNA, 12 nt, Homo sapiens
caagccagauuu

SEQ ID NO: 48500 - RNA, 17 nt, Homo sapiens
caagccaucggagcugc

SEQ ID NO: 48501 - RNA, 15 nt, Homo sapiens
caagccucaugucca

SEQ ID NO: 48502 - RNA, 14 nt, Homo sapiens
caagccugccucaa

SEQ ID NO: 48503 - RNA, 15 nt, Homo sapiens
caagcucacagaccu

SEQ ID NO: 48504 - RNA, 20 nt, Homo sapiens
caagcuuuucaaaauuggac

SEQ ID NO: 48505 - RNA, 16 nt, Homo sapiens
caaggcccccgggccg

SEQ ID NO: 48506 - RNA, 18 nt, Homo sapiens
caaggcccccgggccgac

SEQ ID NO: 48507 - RNA, 19 nt, Homo sapiens
caaggcccccgggccgacg

SEQ ID NO: 48508 - RNA, 20 nt, Homo sapiens
caaggcccccgggccgacgg

SEQ ID NO: 48509 - RNA, 21 nt, Homo sapiens
caaggcccccgggccgacgga

SEQ ID NO: 48510 - RNA, 22 nt, Homo sapiens
caaggcccccgggccgacggag

SEQ ID NO: 48511 - RNA, 23 nt, Homo sapiens
caaggcccccgggccgacggagc

SEQ ID NO: 48512 - RNA, 17 nt, Homo sapiens
caaggcuggagugcagu

SEQ ID NO: 48513 - RNA, 21 nt, Homo sapiens
caaggcuggagugcaguggcg

SEQ ID NO: 48514 - RNA, 22 nt, Homo sapiens
caaggcuggagugcaguggcgc

SEQ ID NO: 48515 - RNA, 18 nt, Homo sapiens
caaggcuuagacccucau

SEQ ID NO: 48516 - RNA, 21 nt, Homo sapiens
caaggcuuagacccucaugcu

SEQ ID NO: 48517 - RNA, 22 nt, Homo sapiens
caaggguacacugccuucucaa

SEQ ID NO: 48518 - RNA, 16 nt, Homo sapiens
caagucagucauucag

SEQ ID NO: 48519 - RNA, 12 nt, Homo sapiens
caaguccaagca

SEQ ID NO: 48520 - RNA, 18 nt, Homo sapiens
caaguccaagcauaccaa

SEQ ID NO: 48521 - RNA, 18 nt, Homo sapiens
caagugauccgcccaucu

SEQ ID NO: 48522 - RNA, 19 nt, Homo sapiens
caagugauccgcccaucuc

SEQ ID NO: 48523 - RNA, 20 nt, Homo sapiens
caaguucuuaguugcuguau

SEQ ID NO: 48524 - RNA, 21 nt, Homo sapiens
caaguucuuaguugcuguaug

SEQ ID NO: 48525 - RNA, 16 nt, Homo sapiens
caaguuguguuugaua

SEQ ID NO: 48526 - RNA, 17 nt, Homo sapiens
caaguuguguuugauau

SEQ ID NO: 48527 - RNA, 23 nt, Homo sapiens
caaguuguguuugauauccaaag

SEQ ID NO: 48528 - RNA, 17 nt, Homo sapiens
caaguuguuugagaaau

SEQ ID NO: 48529 - RNA, 22 nt, Homo sapiens
caauacauuauuggacuuccau

SEQ ID NO: 48530 - RNA, 21 nt, Homo sapiens
caauagaaggauguacauuuc

SEQ ID NO: 48531 - RNA, 21 nt, Homo sapiens
caauagucaaauugugugaaa

SEQ ID NO: 48532 - RNA, 14 nt, Homo sapiens
caauauccuaauaa

SEQ ID NO: 48533 - RNA, 19 nt, Homo sapiens
caauauucauagcagcuua

SEQ ID NO: 48534 - RNA, 16 nt, Homo sapiens
caauauuguacaguuu

SEQ ID NO: 48535 - RNA, 23 nt, Homo sapiens
caauauuuauuauuuucaccugu

SEQ ID NO: 48536 - RNA, 12 nt, Homo sapiens
caaucaucaacc

SEQ ID NO: 48537 - RNA, 13 nt, Homo sapiens
caaucaucaaccc

SEQ ID NO: 48538 - RNA, 14 nt, Homo sapiens
caaucaucaacccc

SEQ ID NO: 48539 - RNA, 18 nt, Homo sapiens
caaucaucaacccccaac

SEQ ID NO: 48540 - RNA, 16 nt, Homo sapiens
caauccugauucauau

SEQ ID NO: 48541 - RNA, 20 nt, Homo sapiens
caauccugauucauauuuaa

SEQ ID NO: 48542 - RNA, 21 nt, Homo sapiens
caaucugagccagugcuuuaa

SEQ ID NO: 48543 - RNA, 19 nt, Homo sapiens
caaucuuaacucauugcaa

SEQ ID NO: 48544 - RNA, 20 nt, Homo sapiens
caaucuucucagaaggcaaa

SEQ ID NO: 48545 - RNA, 16 nt, Homo sapiens
caaugaagucucugaa

SEQ ID NO: 48546 - RNA, 16 nt, Homo sapiens
caaugacuuacuguac

SEQ ID NO: 48547 - RNA, 15 nt, Homo sapiens
caaugcuguauuuua

SEQ ID NO: 48548 - RNA, 16 nt, Homo sapiens
caaugcuguauuuuaa

SEQ ID NO: 48549 - RNA, 19 nt, Homo sapiens
caauguuuagcagauuuaa

SEQ ID NO: 48550 - RNA, 17 nt, Homo sapiens
caauuauaucaguccuc

SEQ ID NO: 48551 - RNA, 19 nt, Homo sapiens
caauuauuugaagauuuaa

SEQ ID NO: 48552 - RNA, 20 nt, Homo sapiens
caauuauuuuuacaguucuc

SEQ ID NO: 48553 - RNA, 21 nt, Homo sapiens
caauuauuuuuacaguucucc

SEQ ID NO: 48554 - RNA, 13 nt, Homo sapiens
caauuccucuggg

SEQ ID NO: 48555 - RNA, 19 nt, Homo sapiens
caauucuauuacgugcaau

SEQ ID NO: 48556 - RNA, 20 nt, Homo sapiens
caauucuauuacgugcaaua

SEQ ID NO: 48557 - RNA, 21 nt, Homo sapiens
caauucuauuacgugcaauac

SEQ ID NO: 48558 - RNA, 20 nt, Homo sapiens
caauuuuaaggcauauuuaa

SEQ ID NO: 48559 - RNA, 14 nt, Homo sapiens
cacaaaauugggaa

SEQ ID NO: 48560 - RNA, 15 nt, Homo sapiens
cacaaccugucccag

SEQ ID NO: 48561 - RNA, 20 nt, Homo sapiens
cacaagugaaaaacauccag

SEQ ID NO: 48562 - RNA, 23 nt, Homo sapiens
cacaaguuguguuugauauccaa

SEQ ID NO: 48563 - RNA, 24 nt, Homo sapiens
cacaaguuguguuugauauccaaa

SEQ ID NO: 48564 - RNA, 11 nt, Homo sapiens
cacacacuuuu

SEQ ID NO: 48565 - RNA, 12 nt, Homo sapiens
cacacacuuuug

SEQ ID NO: 48566 - RNA, 17 nt, Homo sapiens
cacaccccagacgaugu

SEQ ID NO: 48567 - RNA, 22 nt, Homo sapiens
cacacucucccauuauauuuau

SEQ ID NO: 48568 - RNA, 12 nt, Homo sapiens
cacacugaagaa

SEQ ID NO: 48569 - RNA, 13 nt, Homo sapiens
cacacugaagaag

SEQ ID NO: 48570 - RNA, 14 nt, Homo sapiens
cacacugaagaagc

SEQ ID NO: 48571 - RNA, 17 nt, Homo sapiens
cacacugagcugagggg

SEQ ID NO: 48572 - RNA, 16 nt, Homo sapiens
cacagaggaucugcuu

SEQ ID NO: 48573 - RNA, 14 nt, Homo sapiens
cacagaguuguuac

SEQ ID NO: 48574 - RNA, 20 nt, Homo sapiens
cacagccucuuagaugcagu

SEQ ID NO: 48575 - RNA, 16 nt, Homo sapiens
cacagcugaacuuguu

SEQ ID NO: 48576 - RNA, 12 nt, Homo sapiens
cacaggacagcc

SEQ ID NO: 48577 - RNA, 14 nt, Homo sapiens
cacaggacagcccu

SEQ ID NO: 48578 - RNA, 13 nt, Homo sapiens
cacagugaucaag

SEQ ID NO: 48579 - RNA, 17 nt, Homo sapiens
cacagugaucaaguuau

SEQ ID NO: 48580 - RNA, 12 nt, Homo sapiens
cacagugucugg

SEQ ID NO: 48581 - RNA, 13 nt, Homo sapiens
cacagugucuggc

SEQ ID NO: 48582 - RNA, 13 nt, Homo sapiens
cacaguuuugguu

SEQ ID NO: 48583 - RNA, 21 nt, Homo sapiens
cacaguuuugguugcuuuaau

SEQ ID NO: 48584 - RNA, 17 nt, Homo sapiens
cacauaaggaaacuggg

SEQ ID NO: 48585 - RNA, 21 nt, Homo sapiens
cacaucaaaauaugccccauu

SEQ ID NO: 48586 - RNA, 12 nt, Homo sapiens
cacaucagcuug

SEQ ID NO: 48587 - RNA, 13 nt, Homo sapiens
cacaucagcuugc

SEQ ID NO: 48588 - RNA, 12 nt, Homo sapiens
cacauccugugg

SEQ ID NO: 48589 - RNA, 13 nt, Homo sapiens
cacauccuguggg

SEQ ID NO: 48590 - RNA, 14 nt, Homo sapiens
cacaugauccugca

SEQ ID NO: 48591 - RNA, 15 nt, Homo sapiens
cacaugauccugcaa

SEQ ID NO: 48592 - RNA, 21 nt, Homo sapiens
cacauuccaagccucaugucc

SEQ ID NO: 48593 - RNA, 23 nt, Homo sapiens
cacauuccugaacaggauauucu

SEQ ID NO: 48594 - RNA, 21 nt, Homo sapiens
cacauuuuauuuuauuaugca

SEQ ID NO: 48595 - RNA, 14 nt, Homo sapiens
caccaaacccggcc

SEQ ID NO: 48596 - RNA, 16 nt, Homo sapiens
caccaaacccggccug

SEQ ID NO: 48597 - RNA, 17 nt, Homo sapiens
caccaaacccggccuga

SEQ ID NO: 48598 - RNA, 21 nt, Homo sapiens
caccaaacccggccugauuaa

SEQ ID NO: 48599 - RNA, 13 nt, Homo sapiens
caccacccuugcc

SEQ ID NO: 48600 - RNA, 20 nt, Homo sapiens
caccagagauaauaugagaa

SEQ ID NO: 48601 - RNA, 22 nt, Homo sapiens
caccauauuaccacagacauac

SEQ ID NO: 48602 - RNA, 21 nt, Homo sapiens
caccauuccuucugcccugcu

SEQ ID NO: 48603 - RNA, 20 nt, Homo sapiens
cacccaaaguaucaggacga

SEQ ID NO: 48604 - RNA, 19 nt, Homo sapiens
caccccggacuccuccgca

SEQ ID NO: 48605 - RNA, 15 nt, Homo sapiens
cacccgcccaccgca

SEQ ID NO: 48606 - RNA, 18 nt, Homo sapiens
cacccuugccauggaggu

SEQ ID NO: 48607 - RNA, 22 nt, Homo sapiens
caccgcagggugaacugcagcg

SEQ ID NO: 48608 - RNA, 23 nt, Homo sapiens
caccgcagggugaacugcagcga

SEQ ID NO: 48609 - RNA, 18 nt, Homo sapiens
caccgcuguacgcgagcg

SEQ ID NO: 48610 - RNA, 19 nt, Homo sapiens
caccgcuguacgcgagcgc

SEQ ID NO: 48611 - RNA, 21 nt, Homo sapiens
caccgcuguacgcgagcgcgc

SEQ ID NO: 48612 - RNA, 22 nt, Homo sapiens
caccgcuguacgcgagcgcgcg

SEQ ID NO: 48613 - RNA, 16 nt, Homo sapiens
caccucauggaauugg

SEQ ID NO: 48614 - RNA, 12 nt, Homo sapiens
caccugcaggcg

SEQ ID NO: 48615 - RNA, 21 nt, Homo sapiens
caccugcaggcgugaccugac

SEQ ID NO: 48616 - RNA, 14 nt, Homo sapiens
caccuguaauccca

SEQ ID NO: 48617 - RNA, 15 nt, Homo sapiens
caccugugagaccaa

SEQ ID NO: 48618 - RNA, 14 nt, Homo sapiens
caccugugccgucc

SEQ ID NO: 48619 - RNA, 21 nt, Homo sapiens
caccugugccguccccagagc

SEQ ID NO: 48620 - RNA, 18 nt, Homo sapiens
caccuuacuucuucucau

SEQ ID NO: 48621 - RNA, 15 nt, Homo sapiens
cacgcccagcuaauu

SEQ ID NO: 48622 - RNA, 16 nt, Homo sapiens
cacgccuguaauccca

SEQ ID NO: 48623 - RNA, 20 nt, Homo sapiens
cacgcucugggucgccggca

SEQ ID NO: 48624 - RNA, 22 nt, Homo sapiens
cacgcucugggucgccggcauc

SEQ ID NO: 48625 - RNA, 20 nt, Homo sapiens
cacggacgaaccuugaaaac

SEQ ID NO: 48626 - RNA, 13 nt, Homo sapiens
cacggcuggagcu

SEQ ID NO: 48627 - RNA, 23 nt, Homo sapiens
cacguuucuaaaggcuaccuuug

SEQ ID NO: 48628 - RNA, 18 nt, Homo sapiens
cacuaaaaaggcauguaa

SEQ ID NO: 48629 - RNA, 19 nt, Homo sapiens
cacuaaaaaggcauguaau

SEQ ID NO: 48630 - RNA, 19 nt, Homo sapiens
cacuaaauugacacuuaaa

SEQ ID NO: 48631 - RNA, 14 nt, Homo sapiens
cacuaguauuucua

SEQ ID NO: 48632 - RNA, 15 nt, Homo sapiens
cacuaguauuucuau

SEQ ID NO: 48633 - RNA, 19 nt, Homo sapiens
cacucauuuauuuccauau

SEQ ID NO: 48634 - RNA, 23 nt, Homo sapiens
cacuccaauuaaggauuuuaugc

SEQ ID NO: 48635 - RNA, 22 nt, Homo sapiens
cacuccacuuggacaugggccc

SEQ ID NO: 48636 - RNA, 23 nt, Homo sapiens
cacuccagccugagcgacaguga

SEQ ID NO: 48637 - RNA, 24 nt, Homo sapiens
cacucuauguucuaagaagugaaa

SEQ ID NO: 48638 - RNA, 21 nt, Homo sapiens
cacugaagaagcaccaaucau

SEQ ID NO: 48639 - RNA, 14 nt, Homo sapiens
cacugagcugaggg

SEQ ID NO: 48640 - RNA, 12 nt, Homo sapiens
cacugcauacaa

SEQ ID NO: 48641 - RNA, 13 nt, Homo sapiens
cacugcauacaau

SEQ ID NO: 48642 - RNA, 14 nt, Homo sapiens
cacugcauguuugu

SEQ ID NO: 48643 - RNA, 15 nt, Homo sapiens
cacugccuucucaac

SEQ ID NO: 48644 - RNA, 24 nt, Homo sapiens
cacugcuuaacuucacauauugau

SEQ ID NO: 48645 - RNA, 21 nt, Homo sapiens
cacugguucuucuuggucuca

SEQ ID NO: 48646 - RNA, 22 nt, Homo sapiens
cacugguucuucuuggucucag

SEQ ID NO: 48647 - RNA, 16 nt, Homo sapiens
cacugugggcuuuuau

SEQ ID NO: 48648 - RNA, 22 nt, Homo sapiens
cacuguggguagacacacauga

SEQ ID NO: 48649 - RNA, 23 nt, Homo sapiens
cacuguggguagacacacaugaa

SEQ ID NO: 48650 - RNA, 16 nt, Homo sapiens
cacuguuaucuucacu

SEQ ID NO: 48651 - RNA, 19 nt, Homo sapiens
cacuguuaucuucacuuuu

SEQ ID NO: 48652 - RNA, 14 nt, Homo sapiens
cacuuaaaaauggu

SEQ ID NO: 48653 - RNA, 16 nt, Homo sapiens
cacuuauugacuauua

SEQ ID NO: 48654 - RNA, 18 nt, Homo sapiens
cacuuccucccggccgcg

SEQ ID NO: 48655 - RNA, 22 nt, Homo sapiens
cacuuccucccggccgcgcugc

SEQ ID NO: 48656 - RNA, 17 nt, Homo sapiens
cacuugaacccgggagg

SEQ ID NO: 48657 - RNA, 22 nt, Homo sapiens
cacuuggacaugggccccagau

SEQ ID NO: 48658 - RNA, 20 nt, Homo sapiens
cacuugggacaaaaacaaac

SEQ ID NO: 48659 - RNA, 20 nt, Homo sapiens
cacuugguucuuguacucua

SEQ ID NO: 48660 - RNA, 12 nt, Homo sapiens
cacuugucaaua

SEQ ID NO: 48661 - RNA, 19 nt, Homo sapiens
cacuuguguuuugcaagcc

SEQ ID NO: 48662 - RNA, 19 nt, Homo sapiens
cacuuuaacacagugucug

SEQ ID NO: 48663 - RNA, 21 nt, Homo sapiens
cacuuuaacacagugucuggc

SEQ ID NO: 48664 - RNA, 19 nt, Homo sapiens
cacuuugggaggcugaggc

SEQ ID NO: 48665 - RNA, 22 nt, Homo sapiens
cagaaaacaaggaugaauuaag

SEQ ID NO: 48666 - RNA, 19 nt, Homo sapiens
cagaaaugccuuacccuca

SEQ ID NO: 48667 - RNA, 18 nt, Homo sapiens
cagaaauuuaauucaugu

SEQ ID NO: 48668 - RNA, 19 nt, Homo sapiens
cagaaauuuaauucauguu

SEQ ID NO: 48669 - RNA, 23 nt, Homo sapiens
cagaagaaauucugcaagcuuuu

SEQ ID NO: 48670 - RNA, 13 nt, Homo sapiens
cagaagcaaccca

SEQ ID NO: 48671 - RNA, 18 nt, Homo sapiens
cagaagcuccagguagag

SEQ ID NO: 48672 - RNA, 13 nt, Homo sapiens
cagaagucaaggc

SEQ ID NO: 48673 - RNA, 23 nt, Homo sapiens
cagaagucaaggcuuagacccuc

SEQ ID NO: 48674 - RNA, 22 nt, Homo sapiens
cagacauagaauuaacacauga

SEQ ID NO: 48675 - RNA, 16 nt, Homo sapiens
cagacaucaacagaua

SEQ ID NO: 48676 - RNA, 23 nt, Homo sapiens
cagacaugagagacagcaggucu

SEQ ID NO: 48677 - RNA, 14 nt, Homo sapiens
cagaccgggguucc

SEQ ID NO: 48678 - RNA, 19 nt, Homo sapiens
cagacucuggucaagaagc

SEQ ID NO: 48679 - RNA, 16 nt, Homo sapiens
cagagaaaagacauaa

SEQ ID NO: 48680 - RNA, 21 nt, Homo sapiens
cagagaaaauaaaagcacuua

SEQ ID NO: 48681 - RNA, 19 nt, Homo sapiens
cagagacgggguuugccau

SEQ ID NO: 48682 - RNA, 20 nt, Homo sapiens
cagagcaagacucugucuca

SEQ ID NO: 48683 - RNA, 16 nt, Homo sapiens
cagagcuacaggcccc

SEQ ID NO: 48684 - RNA, 17 nt, Homo sapiens
cagagcuacaggcccca

SEQ ID NO: 48685 - RNA, 12 nt, Homo sapiens
cagagguugcag

SEQ ID NO: 48686 - RNA, 15 nt, Homo sapiens
cagagguugcaguga

SEQ ID NO: 48687 - RNA, 20 nt, Homo sapiens
cagagguugcagugagccga

SEQ ID NO: 48688 - RNA, 17 nt, Homo sapiens
cagaguuguuacauuuu

SEQ ID NO: 48689 - RNA, 17 nt, Homo sapiens
cagauaaacaguaguga

SEQ ID NO: 48690 - RNA, 23 nt, Homo sapiens
cagauaacuguuauuuauaauca

SEQ ID NO: 48691 - RNA, 14 nt, Homo sapiens
cagauaccaugaug

SEQ ID NO: 48692 - RNA, 17 nt, Homo sapiens
cagauaccaugaugcug

SEQ ID NO: 48693 - RNA, 17 nt, Homo sapiens
cagaucaagccugccuc

SEQ ID NO: 48694 - RNA, 20 nt, Homo sapiens
cagaucauuucaaaacucau

SEQ ID NO: 48695 - RNA, 15 nt, Homo sapiens
cagaucucuaacuuc

SEQ ID NO: 48696 - RNA, 19 nt, Homo sapiens
cagcaauaaagcagcguuu

SEQ ID NO: 48697 - RNA, 14 nt, Homo sapiens
cagcacagccucuu

SEQ ID NO: 48698 - RNA, 22 nt, Homo sapiens
cagcacagccucuuagaugcag

SEQ ID NO: 48699 - RNA, 15 nt, Homo sapiens
cagcaccuacagugu

SEQ ID NO: 48700 - RNA, 12 nt, Homo sapiens
cagcagagaagu

SEQ ID NO: 48701 - RNA, 13 nt, Homo sapiens
cagcagagaaguu

SEQ ID NO: 48702 - RNA, 15 nt, Homo sapiens
cagcagagacggggu

SEQ ID NO: 48703 - RNA, 22 nt, Homo sapiens
cagcaggauagagugggacagu

SEQ ID NO: 48704 - RNA, 15 nt, Homo sapiens
cagcauuuuacuacu

SEQ ID NO: 48705 - RNA, 16 nt, Homo sapiens
cagcauuuuacuacuu

SEQ ID NO: 48706 - RNA, 14 nt, Homo sapiens
cagccagacuggca

SEQ ID NO: 48707 - RNA, 14 nt, Homo sapiens
cagccaggcggcug

SEQ ID NO: 48708 - RNA, 15 nt, Homo sapiens
cagccaggcggcugg

SEQ ID NO: 48709 - RNA, 17 nt, Homo sapiens
cagccaggcggcuggaa

SEQ ID NO: 48710 - RNA, 21 nt, Homo sapiens
cagccaggcggcuggaauuga

SEQ ID NO: 48711 - RNA, 22 nt, Homo sapiens
cagccaggcggcuggaauugaa

SEQ ID NO: 48712 - RNA, 20 nt, Homo sapiens
cagcccccauuguggucaca

SEQ ID NO: 48713 - RNA, 15 nt, Homo sapiens
cagccccgggagugg

SEQ ID NO: 48714 - RNA, 18 nt, Homo sapiens
cagccccuugagaaaccu

SEQ ID NO: 48715 - RNA, 11 nt, Homo sapiens
cagcccuacac

SEQ ID NO: 48716 - RNA, 12 nt, Homo sapiens
cagcccuacacc

SEQ ID NO: 48717 - RNA, 21 nt, Homo sapiens
cagcccucuucugacacuaaa

SEQ ID NO: 48718 - RNA, 15 nt, Homo sapiens
cagccuaguugauca

SEQ ID NO: 48719 - RNA, 15 nt, Homo sapiens
cagccucagcucuca

SEQ ID NO: 48720 - RNA, 22 nt, Homo sapiens
cagccucagcucucaguugcag

SEQ ID NO: 48721 - RNA, 19 nt, Homo sapiens
cagccucuuagaugcaguu

SEQ ID NO: 48722 - RNA, 18 nt, Homo sapiens
cagccugaaagaggaaug

SEQ ID NO: 48723 - RNA, 13 nt, Homo sapiens
cagccugggugac

SEQ ID NO: 48724 - RNA, 16 nt, Homo sapiens
cagccugggugacaga

SEQ ID NO: 48725 - RNA, 22 nt, Homo sapiens
cagccuggucaacauggugaaa

SEQ ID NO: 48726 - RNA, 17 nt, Homo sapiens
cagccuuggauacucca

SEQ ID NO: 48727 - RNA, 15 nt, Homo sapiens
cagcgaguacuuccc

SEQ ID NO: 48728 - RNA, 19 nt, Homo sapiens
cagcgaguacuucccgcug

SEQ ID NO: 48729 - RNA, 19 nt, Homo sapiens
cagcguuucuaugacacau

SEQ ID NO: 48730 - RNA, 14 nt, Homo sapiens
cagcuacaauugua

SEQ ID NO: 48731 - RNA, 15 nt, Homo sapiens
cagcuacaauuguaa

SEQ ID NO: 48732 - RNA, 17 nt, Homo sapiens
cagcuacuugggaggcu

SEQ ID NO: 48733 - RNA, 18 nt, Homo sapiens
cagcuacuugggaggcug

SEQ ID NO: 48734 - RNA, 19 nt, Homo sapiens
cagcuacuugggaggcuga

SEQ ID NO: 48735 - RNA, 22 nt, Homo sapiens
cagcuacuugggaggcugagau

SEQ ID NO: 48736 - RNA, 14 nt, Homo sapiens
cagcucaggcuggc

SEQ ID NO: 48737 - RNA, 16 nt, Homo sapiens
cagcucaggcuggcac

SEQ ID NO: 48738 - RNA, 19 nt, Homo sapiens
cagcucaggcuggcaccgc

SEQ ID NO: 48739 - RNA, 20 nt, Homo sapiens
cagcucaggcuggcaccgcu

SEQ ID NO: 48740 - RNA, 18 nt, Homo sapiens
cagcucuaaaugucaauc

SEQ ID NO: 48741 - RNA, 19 nt, Homo sapiens
cagcucuaaaugucaauca

SEQ ID NO: 48742 - RNA, 23 nt, Homo sapiens
cagcucucaguugcagcccugcu

SEQ ID NO: 48743 - RNA, 15 nt, Homo sapiens
cagcugcagaggcca

SEQ ID NO: 48744 - RNA, 12 nt, Homo sapiens
cagcugccccgg

SEQ ID NO: 48745 - RNA, 13 nt, Homo sapiens
cagcugccccggg

SEQ ID NO: 48746 - RNA, 22 nt, Homo sapiens
cagcugccccggggaggggcgc

SEQ ID NO: 48747 - RNA, 13 nt, Homo sapiens
cagcuguuuaugc

SEQ ID NO: 48748 - RNA, 20 nt, Homo sapiens
cagcuguuuaugcauagaua

SEQ ID NO: 48749 - RNA, 13 nt, Homo sapiens
cagcuuauucaca

SEQ ID NO: 48750 - RNA, 14 nt, Homo sapiens
cagcuugaaacuga

SEQ ID NO: 48751 - RNA, 11 nt, Homo sapiens
caggaaaauaa

SEQ ID NO: 48752 - RNA, 12 nt, Homo sapiens
caggaaaauuaa

SEQ ID NO: 48753 - RNA, 24 nt, Homo sapiens
caggaaagagaacuuccagauccu

SEQ ID NO: 48754 - RNA, 14 nt, Homo sapiens
caggaaaucaaaua

SEQ ID NO: 48755 - RNA, 19 nt, Homo sapiens
caggaaaucaaauaugcaa

SEQ ID NO: 48756 - RNA, 17 nt, Homo sapiens
caggaaccacaagacug

SEQ ID NO: 48757 - RNA, 16 nt, Homo sapiens
caggaccaucccggcc

SEQ ID NO: 48758 - RNA, 17 nt, Homo sapiens
caggaccaucccggccg

SEQ ID NO: 48759 - RNA, 18 nt, Homo sapiens
caggaccaucccggccgg

SEQ ID NO: 48760 - RNA, 19 nt, Homo sapiens
caggaccaucccggccggc

SEQ ID NO: 48761 - RNA, 20 nt, Homo sapiens
caggaccaucccggccggcg

SEQ ID NO: 48762 - RNA, 21 nt, Homo sapiens
caggaccaucccggccggcgc

SEQ ID NO: 48763 - RNA, 24 nt, Homo sapiens
caggaccaucccggccggcgcgcu

SEQ ID NO: 48764 - RNA, 16 nt, Homo sapiens
caggaguuccuaacca

SEQ ID NO: 48765 - RNA, 22 nt, Homo sapiens
caggaguuccuaaccagccugg

SEQ ID NO: 48766 - RNA, 17 nt, Homo sapiens
caggaguuuggccagaa

SEQ ID NO: 48767 - RNA, 17 nt, Homo sapiens
caggauaagagggauua

SEQ ID NO: 48768 - RNA, 14 nt, Homo sapiens
caggauagaguggg

SEQ ID NO: 48769 - RNA, 18 nt, Homo sapiens
caggauagagugggacag

SEQ ID NO: 48770 - RNA, 19 nt, Homo sapiens
caggauagagugggacagu

SEQ ID NO: 48771 - RNA, 22 nt, Homo sapiens
caggauagagugggacaguucc

SEQ ID NO: 48772 - RNA, 14 nt, Homo sapiens
caggaugcccacgg

SEQ ID NO: 48773 - RNA, 17 nt, Homo sapiens
caggauuuaaguuucac

SEQ ID NO: 48774 - RNA, 19 nt, Homo sapiens
caggauuuuaaucuuuuuc

SEQ ID NO: 48775 - RNA, 12 nt, Homo sapiens
caggcagcagga

SEQ ID NO: 48776 - RNA, 14 nt, Homo sapiens
caggcagcaggaua

SEQ ID NO: 48777 - RNA, 15 nt, Homo sapiens
caggcagcaggauag

SEQ ID NO: 48778 - RNA, 14 nt, Homo sapiens
caggccccaucugg

SEQ ID NO: 48779 - RNA, 16 nt, Homo sapiens
caggccccaucugguc

SEQ ID NO: 48780 - RNA, 18 nt, Homo sapiens
caggcggguccgggucgc

SEQ ID NO: 48781 - RNA, 19 nt, Homo sapiens
caggcggguccgggucgca

SEQ ID NO: 48782 - RNA, 18 nt, Homo sapiens
caggcgugaccugacagc

SEQ ID NO: 48783 - RNA, 21 nt, Homo sapiens
caggcgugaccugacagccca

SEQ ID NO: 48784 - RNA, 22 nt, Homo sapiens
caggcgugaccugacagcccaa

SEQ ID NO: 48785 - RNA, 19 nt, Homo sapiens
caggcgugagccaccaaac

SEQ ID NO: 48786 - RNA, 22 nt, Homo sapiens
caggcgugagccaccaaacccg

SEQ ID NO: 48787 - RNA, 14 nt, Homo sapiens
caggcuagauguau

SEQ ID NO: 48788 - RNA, 16 nt, Homo sapiens
caggcucaacauaaca

SEQ ID NO: 48789 - RNA, 16 nt, Homo sapiens
caggcuccaaacugga

SEQ ID NO: 48790 - RNA, 21 nt, Homo sapiens
caggcuccaaacuggagcuug

SEQ ID NO: 48791 - RNA, 16 nt, Homo sapiens
caggcuggcaccgcug

SEQ ID NO: 48792 - RNA, 17 nt, Homo sapiens
caggcuggcaccgcugu

SEQ ID NO: 48793 - RNA, 19 nt, Homo sapiens
caggcuggcaccgcuguac

SEQ ID NO: 48794 - RNA, 11 nt, Homo sapiens
caggcuggcca

SEQ ID NO: 48795 - RNA, 23 nt, Homo sapiens
caggcuggucucgaacugcugga

SEQ ID NO: 48796 - RNA, 23 nt, Homo sapiens
cagggaaauguaugugugucuau

SEQ ID NO: 48797 - RNA, 13 nt, Homo sapiens
cagggacuugaac

SEQ ID NO: 48798 - RNA, 14 nt, Homo sapiens
cagggccuggcugg

SEQ ID NO: 48799 - RNA, 13 nt, Homo sapiens
cagggcuacgcgc

SEQ ID NO: 48800 - RNA, 14 nt, Homo sapiens
cagggcuacgcgcg

SEQ ID NO: 48801 - RNA, 15 nt, Homo sapiens
cagggcuacgcgcgc

SEQ ID NO: 48802 - RNA, 17 nt, Homo sapiens
cagggcuacgcgcgcuc

SEQ ID NO: 48803 - RNA, 18 nt, Homo sapiens
cagggcuacgcgcgcucc

SEQ ID NO: 48804 - RNA, 19 nt, Homo sapiens
cagggcuacgcgcgcuccg

SEQ ID NO: 48805 - RNA, 21 nt, Homo sapiens
cagggcuacgcgcgcuccgcg

SEQ ID NO: 48806 - RNA, 22 nt, Homo sapiens
cagggcuacgcgcgcuccgcgc

SEQ ID NO: 48807 - RNA, 16 nt, Homo sapiens
cagggugaacugcagc

SEQ ID NO: 48808 - RNA, 20 nt, Homo sapiens
cagggugaacugcagcgagu

SEQ ID NO: 48809 - RNA, 14 nt, Homo sapiens
cagguaccuucuca

SEQ ID NO: 48810 - RNA, 22 nt, Homo sapiens
cagguaccuucucaccugugag

SEQ ID NO: 48811 - RNA, 20 nt, Homo sapiens
caggugacccugaugaaaac

SEQ ID NO: 48812 - RNA, 13 nt, Homo sapiens
cagguguccgcua

SEQ ID NO: 48813 - RNA, 10 nt, Homo sapiens
caguaacuga

SEQ ID NO: 48814 - RNA, 21 nt, Homo sapiens
caguaauuuuaaguaauuuca

SEQ ID NO: 48815 - RNA, 16 nt, Homo sapiens
caguaguuagcuuucu

SEQ ID NO: 48816 - RNA, 18 nt, Homo sapiens
caguaguuagcuuucuuc

SEQ ID NO: 48817 - RNA, 14 nt, Homo sapiens
cagucacauuccaa

SEQ ID NO: 48818 - RNA, 15 nt, Homo sapiens
cagucacauuccaag

SEQ ID NO: 48819 - RNA, 15 nt, Homo sapiens
cagucaccucaugga

SEQ ID NO: 48820 - RNA, 14 nt, Homo sapiens
cagucagaagaccu

SEQ ID NO: 48821 - RNA, 19 nt, Homo sapiens
cagucauucagauaugauu

SEQ ID NO: 48822 - RNA, 14 nt, Homo sapiens
caguccucuuucaa

SEQ ID NO: 48823 - RNA, 20 nt, Homo sapiens
cagugagacucugucucagu

SEQ ID NO: 48824 - RNA, 16 nt, Homo sapiens
cagugagaucaaugug

SEQ ID NO: 48825 - RNA, 12 nt, Homo sapiens
cagugagccgag

SEQ ID NO: 48826 - RNA, 19 nt, Homo sapiens
cagugagccgagauugugc

SEQ ID NO: 48827 - RNA, 20 nt, Homo sapiens
cagugagcugauaucaugcc

SEQ ID NO: 48828 - RNA, 19 nt, Homo sapiens
cagugauuaccagggacug

SEQ ID NO: 48829 - RNA, 14 nt, Homo sapiens
cagugcuuggccca

SEQ ID NO: 48830 - RNA, 15 nt, Homo sapiens
cagugcuuggcccag

SEQ ID NO: 48831 - RNA, 16 nt, Homo sapiens
cagugcuuggcccagg

SEQ ID NO: 48832 - RNA, 20 nt, Homo sapiens
cagugcuuggcccaggaguu

SEQ ID NO: 48833 - RNA, 15 nt, Homo sapiens
cagugcuuuaauggc

SEQ ID NO: 48834 - RNA, 16 nt, Homo sapiens
caguggcgcaaucuua

SEQ ID NO: 48835 - RNA, 17 nt, Homo sapiens
caguggcgcaaucuuaa

SEQ ID NO: 48836 - RNA, 18 nt, Homo sapiens
cagugucaaugcagcccc

SEQ ID NO: 48837 - RNA, 13 nt, Homo sapiens
caguguccucauc

SEQ ID NO: 48838 - RNA, 13 nt, Homo sapiens
cagugucuggcac

SEQ ID NO: 48839 - RNA, 18 nt, Homo sapiens
cagugucuggcacuuggg

SEQ ID NO: 48840 - RNA, 19 nt, Homo sapiens
cagugucuggcacuuggga

SEQ ID NO: 48841 - RNA, 16 nt, Homo sapiens
caguucugaagaagau

SEQ ID NO: 48842 - RNA, 19 nt, Homo sapiens
caguuguuauuuauugaaa

SEQ ID NO: 48843 - RNA, 19 nt, Homo sapiens
caguuuuccuucucaucug

SEQ ID NO: 48844 - RNA, 18 nt, Homo sapiens
caguuuucugagaaagac

SEQ ID NO: 48845 - RNA, 15 nt, Homo sapiens
caguuuuuauauaga

SEQ ID NO: 48846 - RNA, 19 nt, Homo sapiens
cauaaacaagaccacguuu

SEQ ID NO: 48847 - RNA, 16 nt, Homo sapiens
cauaaaguaugugcau

SEQ ID NO: 48848 - RNA, 17 nt, Homo sapiens
cauaaaguaugugcaua

SEQ ID NO: 48849 - RNA, 15 nt, Homo sapiens
cauaaagucagugcc

SEQ ID NO: 48850 - RNA, 19 nt, Homo sapiens
cauaaccccggaagccaaa

SEQ ID NO: 48851 - RNA, 15 nt, Homo sapiens
cauaagaauucuguu

SEQ ID NO: 48852 - RNA, 15 nt, Homo sapiens
cauaaugcgugcaua

SEQ ID NO: 48853 - RNA, 23 nt, Homo sapiens
cauacaauuauuuuuacaguucu

SEQ ID NO: 48854 - RNA, 21 nt, Homo sapiens
cauacacaccccggacuccuc

SEQ ID NO: 48855 - RNA, 23 nt, Homo sapiens
cauacacaccccggacuccuccg

SEQ ID NO: 48856 - RNA, 12 nt, Homo sapiens
cauaccacuuuu

SEQ ID NO: 48857 - RNA, 16 nt, Homo sapiens
cauacguacacauuuu

SEQ ID NO: 48858 - RNA, 10 nt, Homo sapiens
cauacugcug

SEQ ID NO: 48859 - RNA, 23 nt, Homo sapiens
cauacuucuuaggguuaugauua

SEQ ID NO: 48860 - RNA, 13 nt, Homo sapiens
cauagaauagugu

SEQ ID NO: 48861 - RNA, 14 nt, Homo sapiens
cauagaauaguguu

SEQ ID NO: 48862 - RNA, 17 nt, Homo sapiens
cauagaauuaacacaug

SEQ ID NO: 48863 - RNA, 22 nt, Homo sapiens
cauagagaauauaaaaauaaag

SEQ ID NO: 48864 - RNA, 19 nt, Homo sapiens
cauagauucccugagcagg

SEQ ID NO: 48865 - RNA, 12 nt, Homo sapiens
cauagcagcuua

SEQ ID NO: 48866 - RNA, 18 nt, Homo sapiens
cauagcagcuuauucaca

SEQ ID NO: 48867 - RNA, 18 nt, Homo sapiens
cauagcaucucaggagau

SEQ ID NO: 48868 - RNA, 12 nt, Homo sapiens
cauagggugaca

SEQ ID NO: 48869 - RNA, 13 nt, Homo sapiens
cauagggugacac

SEQ ID NO: 48870 - RNA, 19 nt, Homo sapiens
cauaguaccucugcuauuu

SEQ ID NO: 48871 - RNA, 14 nt, Homo sapiens
cauauauaacaaug

SEQ ID NO: 48872 - RNA, 18 nt, Homo sapiens
cauaucacaugucagcca

SEQ ID NO: 48873 - RNA, 21 nt, Homo sapiens
cauauuaccacagacauacua

SEQ ID NO: 48874 - RNA, 23 nt, Homo sapiens
cauauuuaacaaaauuugaauag

SEQ ID NO: 48875 - RNA, 15 nt, Homo sapiens
cauauuuucaugcug

SEQ ID NO: 48876 - RNA, 20 nt, Homo sapiens
caucaaggguacacugccuu

SEQ ID NO: 48877 - RNA, 19 nt, Homo sapiens
caucaaugaaugaaugaau

SEQ ID NO: 48878 - RNA, 21 nt, Homo sapiens
caucaaugauaaugcuaauuu

SEQ ID NO: 48879 - RNA, 20 nt, Homo sapiens
caucaauuuuaguugucaau

SEQ ID NO: 48880 - RNA, 21 nt, Homo sapiens
caucacagcugaacuuguuga

SEQ ID NO: 48881 - RNA, 19 nt, Homo sapiens
caucagcacgauuucuguu

SEQ ID NO: 48882 - RNA, 20 nt, Homo sapiens
caucagcugcugaaacaaca

SEQ ID NO: 48883 - RNA, 20 nt, Homo sapiens
caucagcuugcccuguuaaa

SEQ ID NO: 48884 - RNA, 10 nt, Homo sapiens
cauccaaagg

SEQ ID NO: 48885 - RNA, 17 nt, Homo sapiens
cauccaaaggcuccuga

SEQ ID NO: 48886 - RNA, 19 nt, Homo sapiens
cauccagauacacccaaag

SEQ ID NO: 48887 - RNA, 18 nt, Homo sapiens
cauccauggugugcuggc

SEQ ID NO: 48888 - RNA, 12 nt, Homo sapiens
caucccacccgc

SEQ ID NO: 48889 - RNA, 15 nt, Homo sapiens
caucccacccgccca

SEQ ID NO: 48890 - RNA, 16 nt, Homo sapiens
caucccacccgcccac

SEQ ID NO: 48891 - RNA, 17 nt, Homo sapiens
caucccacccgcccacc

SEQ ID NO: 48892 - RNA, 12 nt, Homo sapiens
caucccggccgg

SEQ ID NO: 48893 - RNA, 13 nt, Homo sapiens
caucccggccggc

SEQ ID NO: 48894 - RNA, 14 nt, Homo sapiens
caucccggccggcg

SEQ ID NO: 48895 - RNA, 15 nt, Homo sapiens
caucccggccggcgc

SEQ ID NO: 48896 - RNA, 16 nt, Homo sapiens
caucccggccggcgcg

SEQ ID NO: 48897 - RNA, 17 nt, Homo sapiens
caucccggccggcgcgc

SEQ ID NO: 48898 - RNA, 20 nt, Homo sapiens
caucccggccggcgcgcuca

SEQ ID NO: 48899 - RNA, 17 nt, Homo sapiens
cauccuggaauaucucc

SEQ ID NO: 48900 - RNA, 13 nt, Homo sapiens
caucgccauucuu

SEQ ID NO: 48901 - RNA, 18 nt, Homo sapiens
caucgcuuaggagaaguc

SEQ ID NO: 48902 - RNA, 13 nt, Homo sapiens
caucucugcaauc

SEQ ID NO: 48903 - RNA, 14 nt, Homo sapiens
caucuuggucacau

SEQ ID NO: 48904 - RNA, 17 nt, Homo sapiens
caucuuggucacauaca

SEQ ID NO: 48905 - RNA, 18 nt, Homo sapiens
caucuuggucacauacaa

SEQ ID NO: 48906 - RNA, 12 nt, Homo sapiens
caucuuucaagg

SEQ ID NO: 48907 - RNA, 13 nt, Homo sapiens
caucuuucacauu

SEQ ID NO: 48908 - RNA, 14 nt, Homo sapiens
caugaaaagauuau

SEQ ID NO: 48909 - RNA, 13 nt, Homo sapiens
caugaaggggcgg

SEQ ID NO: 48910 - RNA, 14 nt, Homo sapiens
caugaaggggcggc

SEQ ID NO: 48911 - RNA, 15 nt, Homo sapiens
caugaaggggcggcg

SEQ ID NO: 48912 - RNA, 16 nt, Homo sapiens
caugaaguccaagcau

SEQ ID NO: 48913 - RNA, 17 nt, Homo sapiens
caugaaguccaagcauu

SEQ ID NO: 48914 - RNA, 18 nt, Homo sapiens
caugaaguccaagcauuu

SEQ ID NO: 48915 - RNA, 16 nt, Homo sapiens
caugaauaucaguuau

SEQ ID NO: 48916 - RNA, 17 nt, Homo sapiens
caugagagacagcaggu

SEQ ID NO: 48917 - RNA, 19 nt, Homo sapiens
caugagguacugagaguga

SEQ ID NO: 48918 - RNA, 18 nt, Homo sapiens
caugaucccaccucccau

SEQ ID NO: 48919 - RNA, 21 nt, Homo sapiens
caugaucccaccucccauuca

SEQ ID NO: 48920 - RNA, 22 nt, Homo sapiens
caugaucccaccucccauucac

SEQ ID NO: 48921 - RNA, 12 nt, Homo sapiens
caugaugcugag

SEQ ID NO: 48922 - RNA, 18 nt, Homo sapiens
caugaugcugagcccgga

SEQ ID NO: 48923 - RNA, 16 nt, Homo sapiens
caugcuacacacugca

SEQ ID NO: 48924 - RNA, 12 nt, Homo sapiens
caugcucuccaa

SEQ ID NO: 48925 - RNA, 22 nt, Homo sapiens
caugcucuccaaaccacuuuuu

SEQ ID NO: 48926 - RNA, 16 nt, Homo sapiens
caugcugccaauaucc

SEQ ID NO: 48927 - RNA, 16 nt, Homo sapiens
caugcuggccaggcug

SEQ ID NO: 48928 - RNA, 17 nt, Homo sapiens
caugcuggccaggcugg

SEQ ID NO: 48929 - RNA, 21 nt, Homo sapiens
caugcuggccaggcuggucuc

SEQ ID NO: 48930 - RNA, 12 nt, Homo sapiens
cauggaauugga

SEQ ID NO: 48931 - RNA, 13 nt, Homo sapiens
cauggaauuggag

SEQ ID NO: 48932 - RNA, 17 nt, Homo sapiens
cauggaauuggagcucg

SEQ ID NO: 48933 - RNA, 18 nt, Homo sapiens
cauggaauuggagcucgu

SEQ ID NO: 48934 - RNA, 20 nt, Homo sapiens
cauggaauuggagcucgugg

SEQ ID NO: 48935 - RNA, 17 nt, Homo sapiens
cauggcaggcaucgcca

SEQ ID NO: 48936 - RNA, 22 nt, Homo sapiens
caugggccuagcccacuggcuc

SEQ ID NO: 48937 - RNA, 23 nt, Homo sapiens
cauggggguaauaagagcaguag

SEQ ID NO: 48938 - RNA, 19 nt, Homo sapiens
cauguaugacgugacuggc

SEQ ID NO: 48939 - RNA, 20 nt, Homo sapiens
cauguaugacgugacuggcc

SEQ ID NO: 48940 - RNA, 16 nt, Homo sapiens
caugucagccacugug

SEQ ID NO: 48941 - RNA, 18 nt, Homo sapiens
caugucagccacugugau

SEQ ID NO: 48942 - RNA, 20 nt, Homo sapiens
caugugauuacccucugggu

SEQ ID NO: 48943 - RNA, 18 nt, Homo sapiens
caugugcuaguaauugga

SEQ ID NO: 48944 - RNA, 19 nt, Homo sapiens
caugugcuaguaauuggaa

SEQ ID NO: 48945 - RNA, 20 nt, Homo sapiens
caugugcuaguaauuggaaa

SEQ ID NO: 48946 - RNA, 14 nt, Homo sapiens
cauguucuuaauuc

SEQ ID NO: 48947 - RNA, 10 nt, Homo sapiens
cauguuucuu

SEQ ID NO: 48948 - RNA, 19 nt, Homo sapiens
cauguuuucuuugcuuuaa

SEQ ID NO: 48949 - RNA, 14 nt, Homo sapiens
cauuaaaguucuag

SEQ ID NO: 48950 - RNA, 15 nt, Homo sapiens
cauuaaaguucuagu

SEQ ID NO: 48951 - RNA, 22 nt, Homo sapiens
cauuaaauggaaguaaauguug

SEQ ID NO: 48952 - RNA, 13 nt, Homo sapiens
cauuaauguagau

SEQ ID NO: 48953 - RNA, 13 nt, Homo sapiens
cauuaguuuugaa

SEQ ID NO: 48954 - RNA, 12 nt, Homo sapiens
cauuauauuuau

SEQ ID NO: 48955 - RNA, 14 nt, Homo sapiens
cauuauauuuauua

SEQ ID NO: 48956 - RNA, 24 nt, Homo sapiens
cauuauauuuauuacuguaagaaa

SEQ ID NO: 48957 - RNA, 13 nt, Homo sapiens
cauuaucagucca

SEQ ID NO: 48958 - RNA, 19 nt, Homo sapiens
cauuaucuagauacuguau

SEQ ID NO: 48959 - RNA, 15 nt, Homo sapiens
cauuauuuauauggg

SEQ ID NO: 48960 - RNA, 15 nt, Homo sapiens
cauucaggaugccca

SEQ ID NO: 48961 - RNA, 21 nt, Homo sapiens
cauucaggaugcccacggcug

SEQ ID NO: 48962 - RNA, 22 nt, Homo sapiens
cauucaggaugcccacggcugg

SEQ ID NO: 48963 - RNA, 12 nt, Homo sapiens
cauuccauuugc

SEQ ID NO: 48964 - RNA, 13 nt, Homo sapiens
cauuccauuugcu

SEQ ID NO: 48965 - RNA, 14 nt, Homo sapiens
cauuccauuugcug

SEQ ID NO: 48966 - RNA, 19 nt, Homo sapiens
cauucuccuuguguuacua

SEQ ID NO: 48967 - RNA, 13 nt, Homo sapiens
cauucugccugcc

SEQ ID NO: 48968 - RNA, 14 nt, Homo sapiens
cauucugccugccc

SEQ ID NO: 48969 - RNA, 14 nt, Homo sapiens
cauucuuuuugaaa

SEQ ID NO: 48970 - RNA, 18 nt, Homo sapiens
cauucuuuuugaaauguc

SEQ ID NO: 48971 - RNA, 15 nt, Homo sapiens
cauugcaaccuccac

SEQ ID NO: 48972 - RNA, 16 nt, Homo sapiens
cauugcaaccuccacc

SEQ ID NO: 48973 - RNA, 18 nt, Homo sapiens
cauuggaaacaagucagu

SEQ ID NO: 48974 - RNA, 18 nt, Homo sapiens
cauuguaauugcuaucgc

SEQ ID NO: 48975 - RNA, 21 nt, Homo sapiens
cauuguucuugugaacccaaa

SEQ ID NO: 48976 - RNA, 16 nt, Homo sapiens
cauuuaauccucucaa

SEQ ID NO: 48977 - RNA, 22 nt, Homo sapiens
cauuucaaaagguauuuauuga

SEQ ID NO: 48978 - RNA, 16 nt, Homo sapiens
cauuuccaaauucaca

SEQ ID NO: 48979 - RNA, 18 nt, Homo sapiens
cauuuccaagcaaguauu

SEQ ID NO: 48980 - RNA, 16 nt, Homo sapiens
cauuucucauguugaa

SEQ ID NO: 48981 - RNA, 17 nt, Homo sapiens
cauuucucauguugaaa

SEQ ID NO: 48982 - RNA, 16 nt, Homo sapiens
cauuucugcaucagcu

SEQ ID NO: 48983 - RNA, 22 nt, Homo sapiens
cauuugagcucuggaagccucu

SEQ ID NO: 48984 - RNA, 13 nt, Homo sapiens
cauuugcacuauu

SEQ ID NO: 48985 - RNA, 14 nt, Homo sapiens
cauuugcucaugga

SEQ ID NO: 48986 - RNA, 15 nt, Homo sapiens
cauuugcucauggaa

SEQ ID NO: 48987 - RNA, 10 nt, Homo sapiens
cauuugguaa

SEQ ID NO: 48988 - RNA, 15 nt, Homo sapiens
cauuuguauaaaaua

SEQ ID NO: 48989 - RNA, 18 nt, Homo sapiens
cauuuguuaauauuucuu

SEQ ID NO: 48990 - RNA, 18 nt, Homo sapiens
cauuuuaaaaaauggaac

SEQ ID NO: 48991 - RNA, 14 nt, Homo sapiens
cauuuuaugucuuu

SEQ ID NO: 48992 - RNA, 21 nt, Homo sapiens
cauuuuauuuuauuaugcaug

SEQ ID NO: 48993 - RNA, 22 nt, Homo sapiens
cauuuuauuuuauuaugcauga

SEQ ID NO: 48994 - RNA, 13 nt, Homo sapiens
cauuuucacuuuu

SEQ ID NO: 48995 - RNA, 14 nt, Homo sapiens
cauuuuuacuuggg

SEQ ID NO: 48996 - RNA, 15 nt, Homo sapiens
cauuuuuacuugggu

SEQ ID NO: 48997 - RNA, 16 nt, Homo sapiens
cauuuuugaaaccaaa

SEQ ID NO: 48998 - RNA, 21 nt, Homo sapiens
ccaaaagguauuuuaaucacc

SEQ ID NO: 48999 - RNA, 18 nt, Homo sapiens
ccaaaaucggaucugggg

SEQ ID NO: 49000 - RNA, 17 nt, Homo sapiens
ccaaacagaacuaugga

SEQ ID NO: 49001 - RNA, 22 nt, Homo sapiens
ccaaaccagagccugaguguug

SEQ ID NO: 49002 - RNA, 12 nt, Homo sapiens
ccaaacuggagc

SEQ ID NO: 49003 - RNA, 19 nt, Homo sapiens
ccaaagaaauguaagggaa

SEQ ID NO: 49004 - RNA, 19 nt, Homo sapiens
ccaaagcccaaagugguau

SEQ ID NO: 49005 - RNA, 20 nt, Homo sapiens
ccaaaguaucaggacgagaa

SEQ ID NO: 49006 - RNA, 14 nt, Homo sapiens
ccaaagugguauag

SEQ ID NO: 49007 - RNA, 13 nt, Homo sapiens
ccaaauucacaag

SEQ ID NO: 49008 - RNA, 19 nt, Homo sapiens
ccaaauuucauaccuauca

SEQ ID NO: 49009 - RNA, 15 nt, Homo sapiens
ccaacacgagcaggc

SEQ ID NO: 49010 - RNA, 12 nt, Homo sapiens
ccaacuaggcag

SEQ ID NO: 49011 - RNA, 21 nt, Homo sapiens
ccaacuaucucauuuccaagc

SEQ ID NO: 49012 - RNA, 15 nt, Homo sapiens
ccaagaaauauuccu

SEQ ID NO: 49013 - RNA, 18 nt, Homo sapiens
ccaagaaugagaagaaug

SEQ ID NO: 49014 - RNA, 18 nt, Homo sapiens
ccaagcaaauggccaaug

SEQ ID NO: 49015 - RNA, 13 nt, Homo sapiens
ccaagcaaguauu

SEQ ID NO: 49016 - RNA, 14 nt, Homo sapiens
ccaagcaaguauua

SEQ ID NO: 49017 - RNA, 20 nt, Homo sapiens
ccaagcauuuagauguauag

SEQ ID NO: 49018 - RNA, 14 nt, Homo sapiens
ccaaggcccccggg

SEQ ID NO: 49019 - RNA, 15 nt, Homo sapiens
ccaaggcccccgggc

SEQ ID NO: 49020 - RNA, 16 nt, Homo sapiens
ccaaggcccccgggcc

SEQ ID NO: 49021 - RNA, 18 nt, Homo sapiens
ccaaggcccccgggccga

SEQ ID NO: 49022 - RNA, 20 nt, Homo sapiens
ccaaggcccccgggccgacg

SEQ ID NO: 49023 - RNA, 14 nt, Homo sapiens
ccaaguuuauauac

SEQ ID NO: 49024 - RNA, 17 nt, Homo sapiens
ccaauaaagaguuccuu

SEQ ID NO: 49025 - RNA, 18 nt, Homo sapiens
ccaauaaagaguuccuuc

SEQ ID NO: 49026 - RNA, 12 nt, Homo sapiens
ccaauacauuau

SEQ ID NO: 49027 - RNA, 19 nt, Homo sapiens
ccaaugagaucauugugaa

SEQ ID NO: 49028 - RNA, 19 nt, Homo sapiens
ccacaaaauugggaaagga

SEQ ID NO: 49029 - RNA, 21 nt, Homo sapiens
ccacaacuauauuaucaugca

SEQ ID NO: 49030 - RNA, 19 nt, Homo sapiens
ccacaccagggccuggcug

SEQ ID NO: 49031 - RNA, 18 nt, Homo sapiens
ccacagcuguaugauucc

SEQ ID NO: 49032 - RNA, 19 nt, Homo sapiens
ccacagcuguaugauuccc

SEQ ID NO: 49033 - RNA, 14 nt, Homo sapiens
ccacaggaaccaca

SEQ ID NO: 49034 - RNA, 14 nt, Homo sapiens
ccacauggcuucac

SEQ ID NO: 49035 - RNA, 14 nt, Homo sapiens
ccaccaaacccggc

SEQ ID NO: 49036 - RNA, 15 nt, Homo sapiens
ccaccaaacccggcc

SEQ ID NO: 49037 - RNA, 15 nt, Homo sapiens
ccaccacgcccagcu

SEQ ID NO: 49038 - RNA, 21 nt, Homo sapiens
ccaccagucugacuguuucca

SEQ ID NO: 49039 - RNA, 12 nt, Homo sapiens
ccacccgcccac

SEQ ID NO: 49040 - RNA, 13 nt, Homo sapiens
ccacccgcccacc

SEQ ID NO: 49041 - RNA, 14 nt, Homo sapiens
ccacccgcccaccg

SEQ ID NO: 49042 - RNA, 16 nt, Homo sapiens
ccaccuucuggguuca

SEQ ID NO: 49043 - RNA, 16 nt, Homo sapiens
ccacgcccagcuaauu

SEQ ID NO: 49044 - RNA, 16 nt, Homo sapiens
ccacgcucugggucgc

SEQ ID NO: 49045 - RNA, 18 nt, Homo sapiens
ccacgcucugggucgccg

SEQ ID NO: 49046 - RNA, 20 nt, Homo sapiens
ccacgcucugggucgccggc

SEQ ID NO: 49047 - RNA, 21 nt, Homo sapiens
ccacgcucugggucgccggca

SEQ ID NO: 49048 - RNA, 23 nt, Homo sapiens
ccacgcucugggucgccggcauc

SEQ ID NO: 49049 - RNA, 11 nt, Homo sapiens
ccacguuucua

SEQ ID NO: 49050 - RNA, 14 nt, Homo sapiens
ccacuacugcuacc

SEQ ID NO: 49051 - RNA, 13 nt, Homo sapiens
ccacucauucaaa

SEQ ID NO: 49052 - RNA, 18 nt, Homo sapiens
ccacugcagaagacagua

SEQ ID NO: 49053 - RNA, 12 nt, Homo sapiens
ccacuucacuuu

SEQ ID NO: 49054 - RNA, 15 nt, Homo sapiens
ccacuuccucccggc

SEQ ID NO: 49055 - RNA, 16 nt, Homo sapiens
ccacuuccucccggcc

SEQ ID NO: 49056 - RNA, 17 nt, Homo sapiens
ccacuuccucccggccg

SEQ ID NO: 49057 - RNA, 18 nt, Homo sapiens
ccacuuccucccggccgc

SEQ ID NO: 49058 - RNA, 19 nt, Homo sapiens
ccacuuccucccggccgcg

SEQ ID NO: 49059 - RNA, 20 nt, Homo sapiens
ccacuuccucccggccgcgc

SEQ ID NO: 49060 - RNA, 15 nt, Homo sapiens
ccacuuggacauggg

SEQ ID NO: 49061 - RNA, 21 nt, Homo sapiens
ccacuuuccaauaaagaguuc

SEQ ID NO: 49062 - RNA, 15 nt, Homo sapiens
ccacuuuuugcagcu

SEQ ID NO: 49063 - RNA, 14 nt, Homo sapiens
ccagaagucaaggc

SEQ ID NO: 49064 - RNA, 14 nt, Homo sapiens
ccagacuggcacag

SEQ ID NO: 49065 - RNA, 16 nt, Homo sapiens
ccagacuggcacaguu

SEQ ID NO: 49066 - RNA, 10 nt, Homo sapiens
ccagagacca

SEQ ID NO: 49067 - RNA, 18 nt, Homo sapiens
ccagagcguguagugaau

SEQ ID NO: 49068 - RNA, 23 nt, Homo sapiens
ccagaucaagccugccucaauca

SEQ ID NO: 49069 - RNA, 17 nt, Homo sapiens
ccagauuuuccugaaaa

SEQ ID NO: 49070 - RNA, 18 nt, Homo sapiens
ccagcacuuugggaggcu

SEQ ID NO: 49071 - RNA, 19 nt, Homo sapiens
ccagcacuuugggaggcug

SEQ ID NO: 49072 - RNA, 14 nt, Homo sapiens
ccagccacugugau

SEQ ID NO: 49073 - RNA, 16 nt, Homo sapiens
ccagcccuacaccauu

SEQ ID NO: 49074 - RNA, 20 nt, Homo sapiens
ccagccugggugacagagca

SEQ ID NO: 49075 - RNA, 15 nt, Homo sapiens
ccagccuugcuccug

SEQ ID NO: 49076 - RNA, 19 nt, Homo sapiens
ccagccuuggauacuccau

SEQ ID NO: 49077 - RNA, 14 nt, Homo sapiens
ccagcugccccggg

SEQ ID NO: 49078 - RNA, 21 nt, Homo sapiens
ccaggagauggaaguugcagu

SEQ ID NO: 49079 - RNA, 21 nt, Homo sapiens
ccaggaguuuggccagaaguc

SEQ ID NO: 49080 - RNA, 23 nt, Homo sapiens
ccaggaguuuggccagaagucaa

SEQ ID NO: 49081 - RNA, 16 nt, Homo sapiens
ccaggcacccccagaa

SEQ ID NO: 49082 - RNA, 12 nt, Homo sapiens
ccaggcggcugg

SEQ ID NO: 49083 - RNA, 14 nt, Homo sapiens
ccaggcggguccgg

SEQ ID NO: 49084 - RNA, 17 nt, Homo sapiens
ccaggcggguccggguc

SEQ ID NO: 49085 - RNA, 18 nt, Homo sapiens
ccaggcggguccgggucg

SEQ ID NO: 49086 - RNA, 20 nt, Homo sapiens
ccaggcggguccgggucgca

SEQ ID NO: 49087 - RNA, 21 nt, Homo sapiens
ccaggcggguccgggucgcag

SEQ ID NO: 49088 - RNA, 19 nt, Homo sapiens
ccagggacugaggggaggg

SEQ ID NO: 49089 - RNA, 19 nt, Homo sapiens
ccagggccuggcugggagu

SEQ ID NO: 49090 - RNA, 22 nt, Homo sapiens
ccagggccuggcugggaguggc

SEQ ID NO: 49091 - RNA, 11 nt, Homo sapiens
ccagggcuacg

SEQ ID NO: 49092 - RNA, 12 nt, Homo sapiens
ccagggcuacgc

SEQ ID NO: 49093 - RNA, 16 nt, Homo sapiens
ccagggcuacgcgcgc

SEQ ID NO: 49094 - RNA, 22 nt, Homo sapiens
ccagggcuacgcgcgcuccgcg

SEQ ID NO: 49095 - RNA, 24 nt, Homo sapiens
ccagggcuacgcgcgcuccgcgca

SEQ ID NO: 49096 - RNA, 16 nt, Homo sapiens
ccagguaccuucucac

SEQ ID NO: 49097 - RNA, 22 nt, Homo sapiens
ccagguagagagaccacaagca

SEQ ID NO: 49098 - RNA, 22 nt, Homo sapiens
ccaggucuaccaaaaaucucaa

SEQ ID NO: 49099 - RNA, 21 nt, Homo sapiens
ccaguaaaugggggugcauuu

SEQ ID NO: 49100 - RNA, 20 nt, Homo sapiens
ccagucugacuguuuccauc

SEQ ID NO: 49101 - RNA, 12 nt, Homo sapiens
ccagugagacag

SEQ ID NO: 49102 - RNA, 19 nt, Homo sapiens
ccagugagacagcucugca

SEQ ID NO: 49103 - RNA, 21 nt, Homo sapiens
ccagugagaucaaugugacgg

SEQ ID NO: 49104 - RNA, 17 nt, Homo sapiens
ccagugcuuuaauggca

SEQ ID NO: 49105 - RNA, 16 nt, Homo sapiens
ccaguguuguggauuu

SEQ ID NO: 49106 - RNA, 20 nt, Homo sapiens
ccauaaccccggaagccaaa

SEQ ID NO: 49107 - RNA, 15 nt, Homo sapiens
ccauagagacuuugu

SEQ ID NO: 49108 - RNA, 16 nt, Homo sapiens
ccauagagacuuugug

SEQ ID NO: 49109 - RNA, 13 nt, Homo sapiens
ccauagggugaca

SEQ ID NO: 49110 - RNA, 14 nt, Homo sapiens
ccauagggugacac

SEQ ID NO: 49111 - RNA, 15 nt, Homo sapiens
ccauagggugacaca

SEQ ID NO: 49112 - RNA, 21 nt, Homo sapiens
ccaucaaggguacacugccuu

SEQ ID NO: 49113 - RNA, 15 nt, Homo sapiens
ccaucauuuacuuuu

SEQ ID NO: 49114 - RNA, 11 nt, Homo sapiens
ccaucccggcc

SEQ ID NO: 49115 - RNA, 16 nt, Homo sapiens
ccaucccggccggcgc

SEQ ID NO: 49116 - RNA, 17 nt, Homo sapiens
ccaucccggccggcgcg

SEQ ID NO: 49117 - RNA, 18 nt, Homo sapiens
ccaucccggccggcgcgc

SEQ ID NO: 49118 - RNA, 20 nt, Homo sapiens
ccaucccggccggcgcgcuc

SEQ ID NO: 49119 - RNA, 18 nt, Homo sapiens
ccaugagaguucugucac

SEQ ID NO: 49120 - RNA, 22 nt, Homo sapiens
ccaugagaguucugucacgguc

SEQ ID NO: 49121 - RNA, 21 nt, Homo sapiens
ccaugaugcugagcccggaaa

SEQ ID NO: 49122 - RNA, 11 nt, Homo sapiens
ccaugcuggcc

SEQ ID NO: 49123 - RNA, 17 nt, Homo sapiens
ccaugcuggccaggcug

SEQ ID NO: 49124 - RNA, 17 nt, Homo sapiens
ccaugugauuacccucu

SEQ ID NO: 49125 - RNA, 20 nt, Homo sapiens
ccauucaggaugcccacggc

SEQ ID NO: 49126 - RNA, 22 nt, Homo sapiens
ccauucaggaugcccacggcug

SEQ ID NO: 49127 - RNA, 13 nt, Homo sapiens
ccauuccaagccu

SEQ ID NO: 49128 - RNA, 21 nt, Homo sapiens
ccauucuacauacuauggaau

SEQ ID NO: 49129 - RNA, 18 nt, Homo sapiens
ccauuguugucugcaacu

SEQ ID NO: 49130 - RNA, 13 nt, Homo sapiens
ccauuugagcucu

SEQ ID NO: 49131 - RNA, 15 nt, Homo sapiens
cccaaaacugauacc

SEQ ID NO: 49132 - RNA, 16 nt, Homo sapiens
cccaaaacugauaccc

SEQ ID NO: 49133 - RNA, 13 nt, Homo sapiens
cccaaaaggcaga

SEQ ID NO: 49134 - RNA, 15 nt, Homo sapiens
cccaaagugcuggga

SEQ ID NO: 49135 - RNA, 17 nt, Homo sapiens
cccaaagugugacucau

SEQ ID NO: 49136 - RNA, 16 nt, Homo sapiens
cccaaauuucauaccu

SEQ ID NO: 49137 - RNA, 20 nt, Homo sapiens
cccaaauuucauaccuauca

SEQ ID NO: 49138 - RNA, 13 nt, Homo sapiens
cccaagaaugaga

SEQ ID NO: 49139 - RNA, 22 nt, Homo sapiens
cccaagggaguuaggcuauuca

SEQ ID NO: 49140 - RNA, 16 nt, Homo sapiens
cccaaggguggguggg

SEQ ID NO: 49141 - RNA, 17 nt, Homo sapiens
cccaagggugggugggg

SEQ ID NO: 49142 - RNA, 21 nt, Homo sapiens
cccaaggguggguggggugag

SEQ ID NO: 49143 - RNA, 13 nt, Homo sapiens
cccacacugucca

SEQ ID NO: 49144 - RNA, 12 nt, Homo sapiens
cccacccgccca

SEQ ID NO: 49145 - RNA, 20 nt, Homo sapiens
cccacuuccucccggccgcg

SEQ ID NO: 49146 - RNA, 16 nt, Homo sapiens
cccagagcuacaggcc

SEQ ID NO: 49147 - RNA, 20 nt, Homo sapiens
cccagaucaagccugccuca

SEQ ID NO: 49148 - RNA, 15 nt, Homo sapiens
cccagcacuuuggga

SEQ ID NO: 49149 - RNA, 20 nt, Homo sapiens
cccagcacuuugggaggcug

SEQ ID NO: 49150 - RNA, 19 nt, Homo sapiens
cccagccccuugagaaacc

SEQ ID NO: 49151 - RNA, 24 nt, Homo sapiens
cccagcgagggacaccgaguggcc

SEQ ID NO: 49152 - RNA, 20 nt, Homo sapiens
cccagcuacuugggaggcug

SEQ ID NO: 49153 - RNA, 15 nt, Homo sapiens
cccagcuagaauuca

SEQ ID NO: 49154 - RNA, 13 nt, Homo sapiens
cccaggaguuugg

SEQ ID NO: 49155 - RNA, 18 nt, Homo sapiens
cccaggaguuuggccaga

SEQ ID NO: 49156 - RNA, 19 nt, Homo sapiens
cccaggaguuuggccagaa

SEQ ID NO: 49157 - RNA, 14 nt, Homo sapiens
cccaggcggguccg

SEQ ID NO: 49158 - RNA, 19 nt, Homo sapiens
cccagggcuugugugcaca

SEQ ID NO: 49159 - RNA, 21 nt, Homo sapiens
cccagggcuugugugcacaua

SEQ ID NO: 49160 - RNA, 13 nt, Homo sapiens
cccaucaucaccc

SEQ ID NO: 49161 - RNA, 18 nt, Homo sapiens
cccauucacagauaccuc

SEQ ID NO: 49162 - RNA, 19 nt, Homo sapiens
cccauucaggaugcccacg

SEQ ID NO: 49163 - RNA, 15 nt, Homo sapiens
cccauuucuauuuau

SEQ ID NO: 49164 - RNA, 14 nt, Homo sapiens
ccccaaguuaguuc

SEQ ID NO: 49165 - RNA, 17 nt, Homo sapiens
ccccaaguuaguucaau

SEQ ID NO: 49166 - RNA, 17 nt, Homo sapiens
ccccagagcuacaggcc

SEQ ID NO: 49167 - RNA, 20 nt, Homo sapiens
cccccauuguggucacagga

SEQ ID NO: 49168 - RNA, 21 nt, Homo sapiens
cccccauuguggucacaggaa

SEQ ID NO: 49169 - RNA, 22 nt, Homo sapiens
cccccauuguggucacaggaag

SEQ ID NO: 49170 - RNA, 11 nt, Homo sapiens
cccccgggccg

SEQ ID NO: 49171 - RNA, 12 nt, Homo sapiens
cccccgggccga

SEQ ID NO: 49172 - RNA, 18 nt, Homo sapiens
cccccgggccgacggagc

SEQ ID NO: 49173 - RNA, 19 nt, Homo sapiens
cccccgggccgacggagcc

SEQ ID NO: 49174 - RNA, 23 nt, Homo sapiens
cccccgggccgacggagccggga

SEQ ID NO: 49175 - RNA, 11 nt, Homo sapiens
ccccgggccga

SEQ ID NO: 49176 - RNA, 19 nt, Homo sapiens
ccccggggaggggcgcucg

SEQ ID NO: 49177 - RNA, 20 nt, Homo sapiens
ccccggggaggggcgcucgc

SEQ ID NO: 49178 - RNA, 21 nt, Homo sapiens
ccccggggaggggcgcucgcu

SEQ ID NO: 49179 - RNA, 15 nt, Homo sapiens
ccccucggagaagag

SEQ ID NO: 49180 - RNA, 22 nt, Homo sapiens
ccccugcacuccagccugagcg

SEQ ID NO: 49181 - RNA, 16 nt, Homo sapiens
cccgaaacuaccagcc

SEQ ID NO: 49182 - RNA, 12 nt, Homo sapiens
cccgcccaccgc

SEQ ID NO: 49183 - RNA, 15 nt, Homo sapiens
cccgcuguuccucgc

SEQ ID NO: 49184 - RNA, 16 nt, Homo sapiens
cccgcuguuccucgcc

SEQ ID NO: 49185 - RNA, 17 nt, Homo sapiens
cccgcuguuccucgcca

SEQ ID NO: 49186 - RNA, 19 nt, Homo sapiens
cccgcuguuccucgccacg

SEQ ID NO: 49187 - RNA, 21 nt, Homo sapiens
cccgcuguuccucgccacgcu

SEQ ID NO: 49188 - RNA, 13 nt, Homo sapiens
cccggccgcgcug

SEQ ID NO: 49189 - RNA, 14 nt, Homo sapiens
cccggccgcgcugc

SEQ ID NO: 49190 - RNA, 15 nt, Homo sapiens
cccggccgcgcugcg

SEQ ID NO: 49191 - RNA, 21 nt, Homo sapiens
cccggccgcgcugcgcgccgc

SEQ ID NO: 49192 - RNA, 14 nt, Homo sapiens
cccggccggcgcgc

SEQ ID NO: 49193 - RNA, 17 nt, Homo sapiens
cccggccggcgcgcuca

SEQ ID NO: 49194 - RNA, 19 nt, Homo sapiens
cccggccggcgcgcucauc

SEQ ID NO: 49195 - RNA, 11 nt, Homo sapiens
cccggccugau

SEQ ID NO: 49196 - RNA, 13 nt, Homo sapiens
cccgggaggcaga

SEQ ID NO: 49197 - RNA, 12 nt, Homo sapiens
cccgggaguggc

SEQ ID NO: 49198 - RNA, 13 nt, Homo sapiens
cccgggaguggcg

SEQ ID NO: 49199 - RNA, 19 nt, Homo sapiens
cccgggaguggcgcgcgcc

SEQ ID NO: 49200 - RNA, 23 nt, Homo sapiens
cccgggaguggcgcgcgccacca

SEQ ID NO: 49201 - RNA, 13 nt, Homo sapiens
cccgggccgacgg

SEQ ID NO: 49202 - RNA, 14 nt, Homo sapiens
cccgggccgacgga

SEQ ID NO: 49203 - RNA, 16 nt, Homo sapiens
cccgggccgacggagc

SEQ ID NO: 49204 - RNA, 17 nt, Homo sapiens
cccgggccgacggagcc

SEQ ID NO: 49205 - RNA, 21 nt, Homo sapiens
cccgggccgacggagccggga

SEQ ID NO: 49206 - RNA, 19 nt, Homo sapiens
cccggggaggggcgcucgc

SEQ ID NO: 49207 - RNA, 16 nt, Homo sapiens
cccgugugccugagcg

SEQ ID NO: 49208 - RNA, 11 nt, Homo sapiens
cccucaagaca

SEQ ID NO: 49209 - RNA, 12 nt, Homo sapiens
cccucaagacaa

SEQ ID NO: 49210 - RNA, 14 nt, Homo sapiens
cccucaugcugcca

SEQ ID NO: 49211 - RNA, 19 nt, Homo sapiens
cccucuccucucuuccucc

SEQ ID NO: 49212 - RNA, 15 nt, Homo sapiens
cccucuggcugcugg

SEQ ID NO: 49213 - RNA, 17 nt, Homo sapiens
cccucuggcugcuggug

SEQ ID NO: 49214 - RNA, 18 nt, Homo sapiens
cccucuggcugcuggugg

SEQ ID NO: 49215 - RNA, 19 nt, Homo sapiens
cccucuguugccaaggcug

SEQ ID NO: 49216 - RNA, 22 nt, Homo sapiens
cccucuguugccaaggcuggag

SEQ ID NO: 49217 - RNA, 16 nt, Homo sapiens
cccugaaagucccaga

SEQ ID NO: 49218 - RNA, 17 nt, Homo sapiens
cccugaaagucccagau

SEQ ID NO: 49219 - RNA, 19 nt, Homo sapiens
cccugaaagucccagauca

SEQ ID NO: 49220 - RNA, 16 nt, Homo sapiens
cccugaauuuaaauag

SEQ ID NO: 49221 - RNA, 15 nt, Homo sapiens
cccugagggucuggg

SEQ ID NO: 49222 - RNA, 18 nt, Homo sapiens
cccugcacuccagccuga

SEQ ID NO: 49223 - RNA, 12 nt, Homo sapiens
cccugccuggau

SEQ ID NO: 49224 - RNA, 18 nt, Homo sapiens
cccugccuggaucucaca

SEQ ID NO: 49225 - RNA, 15 nt, Homo sapiens
cccuggccuagcaua

SEQ ID NO: 49226 - RNA, 11 nt, Homo sapiens
cccuguacucc

SEQ ID NO: 49227 - RNA, 12 nt, Homo sapiens
cccuguacucca

SEQ ID NO: 49228 - RNA, 18 nt, Homo sapiens
cccuguacuccagccugg

SEQ ID NO: 49229 - RNA, 19 nt, Homo sapiens
cccuguacuccagccuggg

SEQ ID NO: 49230 - RNA, 12 nt, Homo sapiens
cccugugcggcc

SEQ ID NO: 49231 - RNA, 14 nt, Homo sapiens
cccugugcggccug

SEQ ID NO: 49232 - RNA, 12 nt, Homo sapiens
cccuuacaggaa

SEQ ID NO: 49233 - RNA, 17 nt, Homo sapiens
cccuucauguacaucca

SEQ ID NO: 49234 - RNA, 15 nt, Homo sapiens
cccuucccacacugu

SEQ ID NO: 49235 - RNA, 16 nt, Homo sapiens
cccuugaugaagaagu

SEQ ID NO: 49236 - RNA, 11 nt, Homo sapiens
cccuugccaug

SEQ ID NO: 49237 - RNA, 15 nt, Homo sapiens
cccuuggacauuuua

SEQ ID NO: 49238 - RNA, 18 nt, Homo sapiens
cccuuggacauuuuaugu

SEQ ID NO: 49239 - RNA, 19 nt, Homo sapiens
cccuuugaugauuaauuca

SEQ ID NO: 49240 - RNA, 13 nt, Homo sapiens
cccuuuuacauac

SEQ ID NO: 49241 - RNA, 14 nt, Homo sapiens
ccgaaacuaccagc

SEQ ID NO: 49242 - RNA, 15 nt, Homo sapiens
ccgaaacuaccagcc

SEQ ID NO: 49243 - RNA, 13 nt, Homo sapiens
ccgacggagccgg

SEQ ID NO: 49244 - RNA, 14 nt, Homo sapiens
ccgacggagccggg

SEQ ID NO: 49245 - RNA, 16 nt, Homo sapiens
ccgacggagccgggaa

SEQ ID NO: 49246 - RNA, 20 nt, Homo sapiens
ccgcagggugaacugcagcg

SEQ ID NO: 49247 - RNA, 19 nt, Homo sapiens
ccgcauccuagucucuauc

SEQ ID NO: 49248 - RNA, 18 nt, Homo sapiens
ccgcgcagcucaggcugg

SEQ ID NO: 49249 - RNA, 23 nt, Homo sapiens
ccgcgcagcucaggcuggcaccg

SEQ ID NO: 49250 - RNA, 11 nt, Homo sapiens
ccgcgcuccuc

SEQ ID NO: 49251 - RNA, 13 nt, Homo sapiens
ccgcgcuccucgg

SEQ ID NO: 49252 - RNA, 18 nt, Homo sapiens
ccgcgcuccucggacggc

SEQ ID NO: 49253 - RNA, 21 nt, Homo sapiens
ccgcgcuccucggacggcucc

SEQ ID NO: 49254 - RNA, 22 nt, Homo sapiens
ccgcgcuccucggacggcuccg

SEQ ID NO: 49255 - RNA, 23 nt, Homo sapiens
ccgcgcuccucggacggcuccgg

SEQ ID NO: 49256 - RNA, 14 nt, Homo sapiens
ccgcgcugcgcgcc

SEQ ID NO: 49257 - RNA, 15 nt, Homo sapiens
ccgcgcugcgcgccg

SEQ ID NO: 49258 - RNA, 16 nt, Homo sapiens
ccgcgcugcgcgccgc

SEQ ID NO: 49259 - RNA, 21 nt, Homo sapiens
ccgcgcugcgcgccgcgcucc

SEQ ID NO: 49260 - RNA, 23 nt, Homo sapiens
ccgcgcugcgcgccgcgcuccuc

SEQ ID NO: 49261 - RNA, 12 nt, Homo sapiens
ccgcuacuucca

SEQ ID NO: 49262 - RNA, 13 nt, Homo sapiens
ccgcuacuuccag

SEQ ID NO: 49263 - RNA, 15 nt, Homo sapiens
ccgcuacuuccaggg

SEQ ID NO: 49264 - RNA, 15 nt, Homo sapiens
ccgcuauccaccaaa

SEQ ID NO: 49265 - RNA, 16 nt, Homo sapiens
ccgcuauccaccaaaa

SEQ ID NO: 49266 - RNA, 20 nt, Homo sapiens
ccgcuguacgcgagcgcgcg

SEQ ID NO: 49267 - RNA, 14 nt, Homo sapiens
ccgcuguuccucgc

SEQ ID NO: 49268 - RNA, 16 nt, Homo sapiens
ccgcuguuccucgcca

SEQ ID NO: 49269 - RNA, 17 nt, Homo sapiens
ccgcuguuccucgccac

SEQ ID NO: 49270 - RNA, 19 nt, Homo sapiens
ccgcuguuccucgccacgc

SEQ ID NO: 49271 - RNA, 20 nt, Homo sapiens
ccgcuguuccucgccacgcu

SEQ ID NO: 49272 - RNA, 13 nt, Homo sapiens
ccggaaacuccac

SEQ ID NO: 49273 - RNA, 12 nt, Homo sapiens
ccggaagccaaa

SEQ ID NO: 49274 - RNA, 19 nt, Homo sapiens
ccggaagccaaaccucugu

SEQ ID NO: 49275 - RNA, 12 nt, Homo sapiens
ccggacgcugcu

SEQ ID NO: 49276 - RNA, 14 nt, Homo sapiens
ccggacgcugcugc

SEQ ID NO: 49277 - RNA, 15 nt, Homo sapiens
ccggacgcugcugcc

SEQ ID NO: 49278 - RNA, 16 nt, Homo sapiens
ccggacgcugcugccg

SEQ ID NO: 49279 - RNA, 19 nt, Homo sapiens
ccggacgcugcugccgugg

SEQ ID NO: 49280 - RNA, 23 nt, Homo sapiens
ccggagccccuugggcaggucac

SEQ ID NO: 49281 - RNA, 13 nt, Homo sapiens
ccggagccuccag

SEQ ID NO: 49282 - RNA, 15 nt, Homo sapiens
ccggagccuccagcu

SEQ ID NO: 49283 - RNA, 16 nt, Homo sapiens
ccggagccuccagcug

SEQ ID NO: 49284 - RNA, 22 nt, Homo sapiens
ccggagccuccagcugccccgg

SEQ ID NO: 49285 - RNA, 14 nt, Homo sapiens
ccggccgcgcugcg

SEQ ID NO: 49286 - RNA, 16 nt, Homo sapiens
ccggccgcgcugcgcg

SEQ ID NO: 49287 - RNA, 17 nt, Homo sapiens
ccggccgcgcugcgcgc

SEQ ID NO: 49288 - RNA, 12 nt, Homo sapiens
ccggccggcgcg

SEQ ID NO: 49289 - RNA, 13 nt, Homo sapiens
ccggccggcgcgc

SEQ ID NO: 49290 - RNA, 14 nt, Homo sapiens
ccggccggcgcgcu

SEQ ID NO: 49291 - RNA, 15 nt, Homo sapiens
ccggccggcgcgcuc

SEQ ID NO: 49292 - RNA, 11 nt, Homo sapiens
ccggcgcgcuc

SEQ ID NO: 49293 - RNA, 15 nt, Homo sapiens
ccggcgcgcucaucc

SEQ ID NO: 49294 - RNA, 20 nt, Homo sapiens
ccggcgcgcucaucccaccc

SEQ ID NO: 49295 - RNA, 16 nt, Homo sapiens
ccgggaaagaagagcc

SEQ ID NO: 49296 - RNA, 22 nt, Homo sapiens
ccgggaaagaagagccggagcc

SEQ ID NO: 49297 - RNA, 21 nt, Homo sapiens
ccgggaguggcgcgcgccacc

SEQ ID NO: 49298 - RNA, 22 nt, Homo sapiens
ccgggaguggcgcgcgccacca

SEQ ID NO: 49299 - RNA, 23 nt, Homo sapiens
ccgggaguggcgcgcgccaccac

SEQ ID NO: 49300 - RNA, 13 nt, Homo sapiens
ccgggcauggugg

SEQ ID NO: 49301 - RNA, 14 nt, Homo sapiens
ccgggccgacggag

SEQ ID NO: 49302 - RNA, 15 nt, Homo sapiens
ccgggccgacggagc

SEQ ID NO: 49303 - RNA, 17 nt, Homo sapiens
ccgggccgacggagccg

SEQ ID NO: 49304 - RNA, 18 nt, Homo sapiens
ccgggccgacggagccgg

SEQ ID NO: 49305 - RNA, 19 nt, Homo sapiens
ccgggcgcgguggcucacg

SEQ ID NO: 49306 - RNA, 13 nt, Homo sapiens
ccggggaggggcg

SEQ ID NO: 49307 - RNA, 15 nt, Homo sapiens
ccggggaggggcgcu

SEQ ID NO: 49308 - RNA, 16 nt, Homo sapiens
ccggggaggggcgcuc

SEQ ID NO: 49309 - RNA, 19 nt, Homo sapiens
ccggggaggggcgcucgcu

SEQ ID NO: 49310 - RNA, 16 nt, Homo sapiens
ccgguccuugcugcac

SEQ ID NO: 49311 - RNA, 20 nt, Homo sapiens
ccgucucccaaagugcuggg

SEQ ID NO: 49312 - RNA, 11 nt, Homo sapiens
ccgugggccug

SEQ ID NO: 49313 - RNA, 15 nt, Homo sapiens
ccgugugccugagcg

SEQ ID NO: 49314 - RNA, 22 nt, Homo sapiens
ccguguuacugccuaucagcau

SEQ ID NO: 49315 - RNA, 23 nt, Homo sapiens
ccguguuacugccuaucagcauu

SEQ ID NO: 49316 - RNA, 15 nt, Homo sapiens
ccuaaccucauuccc

SEQ ID NO: 49317 - RNA, 22 nt, Homo sapiens
ccuaaccucauuccccaaccac

SEQ ID NO: 49318 - RNA, 16 nt, Homo sapiens
ccuaagucccugcugc

SEQ ID NO: 49319 - RNA, 11 nt, Homo sapiens
ccuaauuuguu

SEQ ID NO: 49320 - RNA, 16 nt, Homo sapiens
ccuacaugagguacug

SEQ ID NO: 49321 - RNA, 15 nt, Homo sapiens
ccuagggugauauua

SEQ ID NO: 49322 - RNA, 11 nt, Homo sapiens
ccuaugaauaa

SEQ ID NO: 49323 - RNA, 18 nt, Homo sapiens
ccuaugaauaaauuuucu

SEQ ID NO: 49324 - RNA, 21 nt, Homo sapiens
ccucaguuuccugaccuauga

SEQ ID NO: 49325 - RNA, 12 nt, Homo sapiens
ccucaugcugcc

SEQ ID NO: 49326 - RNA, 14 nt, Homo sapiens
ccucaugcugccaa

SEQ ID NO: 49327 - RNA, 20 nt, Homo sapiens
ccucaugcugccaauauccu

SEQ ID NO: 49328 - RNA, 21 nt, Homo sapiens
ccucauggaauuggagcucgu

SEQ ID NO: 49329 - RNA, 13 nt, Homo sapiens
ccuccagcugccc

SEQ ID NO: 49330 - RNA, 15 nt, Homo sapiens
ccuccagcugccccg

SEQ ID NO: 49331 - RNA, 17 nt, Homo sapiens
ccuccagcugccccggg

SEQ ID NO: 49332 - RNA, 19 nt, Homo sapiens
ccuccaugaauaucaguua

SEQ ID NO: 49333 - RNA, 22 nt, Homo sapiens
ccuccaugaauaucaguuauuu

SEQ ID NO: 49334 - RNA, 23 nt, Homo sapiens
ccuccaugaauaucaguuauuuu

SEQ ID NO: 49335 - RNA, 13 nt, Homo sapiens
ccucccggccgcg

SEQ ID NO: 49336 - RNA, 15 nt, Homo sapiens
ccucccggccgcgcu

SEQ ID NO: 49337 - RNA, 16 nt, Homo sapiens
ccucccggccgcgcug

SEQ ID NO: 49338 - RNA, 20 nt, Homo sapiens
ccucccggccgcgcugcgcg

SEQ ID NO: 49339 - RNA, 21 nt, Homo sapiens
ccucccggccgcgcugcgcgc

SEQ ID NO: 49340 - RNA, 17 nt, Homo sapiens
ccucccuucucuucaca

SEQ ID NO: 49341 - RNA, 21 nt, Homo sapiens
ccucccuucucuucacaguca

SEQ ID NO: 49342 - RNA, 13 nt, Homo sapiens
ccuccgcuacuuc

SEQ ID NO: 49343 - RNA, 12 nt, Homo sapiens
ccucgccacgcu

SEQ ID NO: 49344 - RNA, 16 nt, Homo sapiens
ccucgccacgcucugg

SEQ ID NO: 49345 - RNA, 16 nt, Homo sapiens
ccucggacggcuccgg

SEQ ID NO: 49346 - RNA, 20 nt, Homo sapiens
ccucggacggcuccggacgc

SEQ ID NO: 49347 - RNA, 22 nt, Homo sapiens
ccucggacggcuccggacgcug

SEQ ID NO: 49348 - RNA, 14 nt, Homo sapiens
ccucuauugccaug

SEQ ID NO: 49349 - RNA, 10 nt, Homo sapiens
ccucucccaa

SEQ ID NO: 49350 - RNA, 16 nt, Homo sapiens
ccucucccaacuauaa

SEQ ID NO: 49351 - RNA, 20 nt, Homo sapiens
ccucucucauccacuuucca

SEQ ID NO: 49352 - RNA, 21 nt, Homo sapiens
ccucucucauccacuuuccaa

SEQ ID NO: 49353 - RNA, 16 nt, Homo sapiens
ccucugcuauuugcug

SEQ ID NO: 49354 - RNA, 10 nt, Homo sapiens
ccucuggcug

SEQ ID NO: 49355 - RNA, 22 nt, Homo sapiens
ccucuggcugcugguggcgcug

SEQ ID NO: 49356 - RNA, 14 nt, Homo sapiens
ccucuguugccaag

SEQ ID NO: 49357 - RNA, 15 nt, Homo sapiens
ccucuguugccaagg

SEQ ID NO: 49358 - RNA, 14 nt, Homo sapiens
ccucuugcaauuca

SEQ ID NO: 49359 - RNA, 17 nt, Homo sapiens
ccugaaagucccagauc

SEQ ID NO: 49360 - RNA, 19 nt, Homo sapiens
ccugaauuuaaauagcuuu

SEQ ID NO: 49361 - RNA, 15 nt, Homo sapiens
ccugagaccaaggcc

SEQ ID NO: 49362 - RNA, 18 nt, Homo sapiens
ccugagaccaaggccccc

SEQ ID NO: 49363 - RNA, 19 nt, Homo sapiens
ccugagaccaaggcccccg

SEQ ID NO: 49364 - RNA, 13 nt, Homo sapiens
ccugagaccagcc

SEQ ID NO: 49365 - RNA, 14 nt, Homo sapiens
ccugagaccagcca

SEQ ID NO: 49366 - RNA, 11 nt, Homo sapiens
ccugagcccca

SEQ ID NO: 49367 - RNA, 20 nt, Homo sapiens
ccugagcccuacugugucuc

SEQ ID NO: 49368 - RNA, 18 nt, Homo sapiens
ccugauucauauuuaauu

SEQ ID NO: 49369 - RNA, 13 nt, Homo sapiens
ccugcagacauga

SEQ ID NO: 49370 - RNA, 16 nt, Homo sapiens
ccugccaccuccugcc

SEQ ID NO: 49371 - RNA, 16 nt, Homo sapiens
ccugccaugcucucca

SEQ ID NO: 49372 - RNA, 21 nt, Homo sapiens
ccugcccuuacaggaacagaa

SEQ ID NO: 49373 - RNA, 12 nt, Homo sapiens
ccugcucgccca

SEQ ID NO: 49374 - RNA, 13 nt, Homo sapiens
ccugcucgcccac

SEQ ID NO: 49375 - RNA, 20 nt, Homo sapiens
ccuggacaguuuucugcuuu

SEQ ID NO: 49376 - RNA, 22 nt, Homo sapiens
ccuggacaguuuucugcuuuaa

SEQ ID NO: 49377 - RNA, 20 nt, Homo sapiens
ccuggaucucacaagcacuu

SEQ ID NO: 49378 - RNA, 14 nt, Homo sapiens
ccuggauggcugcc

SEQ ID NO: 49379 - RNA, 19 nt, Homo sapiens
ccuggauuccucacuuuga

SEQ ID NO: 49380 - RNA, 15 nt, Homo sapiens
ccuggccgcagugag

SEQ ID NO: 49381 - RNA, 16 nt, Homo sapiens
ccuggcugggaguggc

SEQ ID NO: 49382 - RNA, 18 nt, Homo sapiens
ccuggcugggaguggcau

SEQ ID NO: 49383 - RNA, 22 nt, Homo sapiens
ccuggcugggaguggcauguau

SEQ ID NO: 49384 - RNA, 20 nt, Homo sapiens
ccuggcuggggccuguugaa

SEQ ID NO: 49385 - RNA, 19 nt, Homo sapiens
ccuggucaacauggugaaa

SEQ ID NO: 49386 - RNA, 17 nt, Homo sapiens
ccuggucuaccuguucg

SEQ ID NO: 49387 - RNA, 18 nt, Homo sapiens
ccuggucuaccuguucgc

SEQ ID NO: 49388 - RNA, 20 nt, Homo sapiens
ccuggucuaccuguucgcgc

SEQ ID NO: 49389 - RNA, 16 nt, Homo sapiens
ccuguaaucccagcac

SEQ ID NO: 49390 - RNA, 17 nt, Homo sapiens
ccuguaaucccagcuac

SEQ ID NO: 49391 - RNA, 19 nt, Homo sapiens
ccugugaaauaguucaaag

SEQ ID NO: 49392 - RNA, 16 nt, Homo sapiens
ccugugacugucucac

SEQ ID NO: 49393 - RNA, 11 nt, Homo sapiens
ccugugcggcc

SEQ ID NO: 49394 - RNA, 13 nt, Homo sapiens
ccugugcggccug

SEQ ID NO: 49395 - RNA, 21 nt, Homo sapiens
ccuguguuucuagggaaauga

SEQ ID NO: 49396 - RNA, 22 nt, Homo sapiens
ccuguuaaaagaugaaaauauu

SEQ ID NO: 49397 - RNA, 13 nt, Homo sapiens
ccuguucgcgcgc

SEQ ID NO: 49398 - RNA, 15 nt, Homo sapiens
ccuguucgcgcgccu

SEQ ID NO: 49399 - RNA, 23 nt, Homo sapiens
ccuuaaacucagggagcauuuau

SEQ ID NO: 49400 - RNA, 18 nt, Homo sapiens
ccuuagcccaucuuucaa

SEQ ID NO: 49401 - RNA, 14 nt, Homo sapiens
ccuuauuguaccuc

SEQ ID NO: 49402 - RNA, 16 nt, Homo sapiens
ccuuauuguaccucuc

SEQ ID NO: 49403 - RNA, 16 nt, Homo sapiens
ccuucauguacaucca

SEQ ID NO: 49404 - RNA, 17 nt, Homo sapiens
ccuucccacacugucca

SEQ ID NO: 49405 - RNA, 15 nt, Homo sapiens
ccuucuggguucaag

SEQ ID NO: 49406 - RNA, 16 nt, Homo sapiens
ccuucuuacaaugcau

SEQ ID NO: 49407 - RNA, 11 nt, Homo sapiens
ccuugagaaac

SEQ ID NO: 49408 - RNA, 13 nt, Homo sapiens
ccuugaugaagaa

SEQ ID NO: 49409 - RNA, 14 nt, Homo sapiens
ccuugaugaagaag

SEQ ID NO: 49410 - RNA, 22 nt, Homo sapiens
ccuugcugcaccugugccgucc

SEQ ID NO: 49411 - RNA, 14 nt, Homo sapiens
ccuuuagaauauua

SEQ ID NO: 49412 - RNA, 18 nt, Homo sapiens
ccuuuggaugcacuuuau

SEQ ID NO: 49413 - RNA, 14 nt, Homo sapiens
ccuuugggaaagga

SEQ ID NO: 49414 - RNA, 13 nt, Homo sapiens
ccuuuuacauacu

SEQ ID NO: 49415 - RNA, 10 nt, Homo sapiens
ccuuuuuccu

SEQ ID NO: 49416 - RNA, 15 nt, Homo sapiens
ccuuuuuguuauuag

SEQ ID NO: 49417 - RNA, 22 nt, Homo sapiens
cgaacugcuggauucaagugau

SEQ ID NO: 49418 - RNA, 21 nt, Homo sapiens
cgaagucuuccauagagacuu

SEQ ID NO: 49419 - RNA, 17 nt, Homo sapiens
cgaaugguuccauucuc

SEQ ID NO: 49420 - RNA, 18 nt, Homo sapiens
cgaaugguuccauucucu

SEQ ID NO: 49421 - RNA, 22 nt, Homo sapiens
cgacagugagacucugucucag

SEQ ID NO: 49422 - RNA, 12 nt, Homo sapiens
cgacaguuuucc

SEQ ID NO: 49423 - RNA, 11 nt, Homo sapiens
cgacggagccg

SEQ ID NO: 49424 - RNA, 13 nt, Homo sapiens
cgacggagccggg

SEQ ID NO: 49425 - RNA, 14 nt, Homo sapiens
cgacggagccggga

SEQ ID NO: 49426 - RNA, 15 nt, Homo sapiens
cgacggagccgggaa

SEQ ID NO: 49427 - RNA, 20 nt, Homo sapiens
cgagaaccuaaguuucaguu

SEQ ID NO: 49428 - RNA, 17 nt, Homo sapiens
cgagcaggcuacuguca

SEQ ID NO: 49429 - RNA, 13 nt, Homo sapiens
cgagccccaggcg

SEQ ID NO: 49430 - RNA, 14 nt, Homo sapiens
cgagccccaggcgg

SEQ ID NO: 49431 - RNA, 15 nt, Homo sapiens
cgagccccaggcggg

SEQ ID NO: 49432 - RNA, 19 nt, Homo sapiens
cgagccccaggcggguccg

SEQ ID NO: 49433 - RNA, 13 nt, Homo sapiens
cgagcgcgcgcgc

SEQ ID NO: 49434 - RNA, 14 nt, Homo sapiens
cgagcgcgcgcgcc

SEQ ID NO: 49435 - RNA, 18 nt, Homo sapiens
cgagcgcuaccucuccag

SEQ ID NO: 49436 - RNA, 16 nt, Homo sapiens
cgagcguugcuggggg

SEQ ID NO: 49437 - RNA, 17 nt, Homo sapiens
cgaguacuucccgcugu

SEQ ID NO: 49438 - RNA, 14 nt, Homo sapiens
cgauccccugucac

SEQ ID NO: 49439 - RNA, 21 nt, Homo sapiens
cgauucucuuuauucagcccc

SEQ ID NO: 49440 - RNA, 20 nt, Homo sapiens
cgauuucuguuuagauaaua

SEQ ID NO: 49441 - RNA, 18 nt, Homo sapiens
cgcaccuguaaucccagc

SEQ ID NO: 49442 - RNA, 13 nt, Homo sapiens
cgcagcucaggcu

SEQ ID NO: 49443 - RNA, 17 nt, Homo sapiens
cgcagcucaggcuggca

SEQ ID NO: 49444 - RNA, 19 nt, Homo sapiens
cgcagcucaggcuggcacc

SEQ ID NO: 49445 - RNA, 11 nt, Homo sapiens
cgcaggaccau

SEQ ID NO: 49446 - RNA, 18 nt, Homo sapiens
cgcaggaccaucccggcc

SEQ ID NO: 49447 - RNA, 21 nt, Homo sapiens
cgcaggaccaucccggccggc

SEQ ID NO: 49448 - RNA, 23 nt, Homo sapiens
cgcaggaccaucccggccggcgc

SEQ ID NO: 49449 - RNA, 19 nt, Homo sapiens
cgcagggugaacugcagcg

SEQ ID NO: 49450 - RNA, 17 nt, Homo sapiens
cgccacgcucugggucg

SEQ ID NO: 49451 - RNA, 19 nt, Homo sapiens
cgccacgcucugggucgcc

SEQ ID NO: 49452 - RNA, 20 nt, Homo sapiens
cgccacgcucugggucgccg

SEQ ID NO: 49453 - RNA, 22 nt, Homo sapiens
cgccacgcucugggucgccggc

SEQ ID NO: 49454 - RNA, 13 nt, Homo sapiens
cgcccaccgcagg

SEQ ID NO: 49455 - RNA, 14 nt, Homo sapiens
cgcccaccgcaggg

SEQ ID NO: 49456 - RNA, 14 nt, Homo sapiens
cgcccacuuccucc

SEQ ID NO: 49457 - RNA, 16 nt, Homo sapiens
cgcccacuuccucccg

SEQ ID NO: 49458 - RNA, 19 nt, Homo sapiens
cgcccacuuccucccggcc

SEQ ID NO: 49459 - RNA, 20 nt, Homo sapiens
cgcccacuuccucccggccg

SEQ ID NO: 49460 - RNA, 23 nt, Homo sapiens
cgcccacuuccucccggccgcgc

SEQ ID NO: 49461 - RNA, 21 nt, Homo sapiens
cgcccagcuaauuuguguauu

SEQ ID NO: 49462 - RNA, 12 nt, Homo sapiens
cgcccucuggcu

SEQ ID NO: 49463 - RNA, 13 nt, Homo sapiens
cgcccucuggcug

SEQ ID NO: 49464 - RNA, 14 nt, Homo sapiens
cgcccucuggcugc

SEQ ID NO: 49465 - RNA, 16 nt, Homo sapiens
cgcccucuggcugcug

SEQ ID NO: 49466 - RNA, 17 nt, Homo sapiens
cgcccucuggcugcugg

SEQ ID NO: 49467 - RNA, 19 nt, Homo sapiens
cgcccucuggcugcuggug

SEQ ID NO: 49468 - RNA, 21 nt, Homo sapiens
cgcccucuggcugcugguggc

SEQ ID NO: 49469 - RNA, 22 nt, Homo sapiens
cgcccucuggcugcugguggcg

SEQ ID NO: 49470 - RNA, 14 nt, Homo sapiens
cgccgcgcuccucg

SEQ ID NO: 49471 - RNA, 16 nt, Homo sapiens
cgccgcgcuccucgga

SEQ ID NO: 49472 - RNA, 18 nt, Homo sapiens
cgccgcgcuccucggacg

SEQ ID NO: 49473 - RNA, 20 nt, Homo sapiens
cgccgcgcuccucggacggc

SEQ ID NO: 49474 - RNA, 22 nt, Homo sapiens
cgccgcgcuccucggacggcuc

SEQ ID NO: 49475 - RNA, 23 nt, Homo sapiens
cgccgcgcuccucggacggcucc

SEQ ID NO: 49476 - RNA, 14 nt, Homo sapiens
cgccggcaucuucu

SEQ ID NO: 49477 - RNA, 17 nt, Homo sapiens
cgccuccgcuacuucca

SEQ ID NO: 49478 - RNA, 13 nt, Homo sapiens
cgcgagcgcgcgc

SEQ ID NO: 49479 - RNA, 14 nt, Homo sapiens
cgcgagcgcgcgcg

SEQ ID NO: 49480 - RNA, 15 nt, Homo sapiens
cgcgagcgcgcgcgc

SEQ ID NO: 49481 - RNA, 20 nt, Homo sapiens
cgcgagcgcgcgcgcccucu

SEQ ID NO: 49482 - RNA, 11 nt, Homo sapiens
cgcgcaccugu

SEQ ID NO: 49483 - RNA, 19 nt, Homo sapiens
cgcgcagcucaggcuggca

SEQ ID NO: 49484 - RNA, 11 nt, Homo sapiens
cgcgccaccac

SEQ ID NO: 49485 - RNA, 12 nt, Homo sapiens
cgcgccaccacg

SEQ ID NO: 49486 - RNA, 13 nt, Homo sapiens
cgcgccaccacgc

SEQ ID NO: 49487 - RNA, 14 nt, Homo sapiens
cgcgccaccacgcc

SEQ ID NO: 49488 - RNA, 15 nt, Homo sapiens
cgcgccaccacgccc

SEQ ID NO: 49489 - RNA, 16 nt, Homo sapiens
cgcgccaccacgccca

SEQ ID NO: 49490 - RNA, 18 nt, Homo sapiens
cgcgccaccacgcccagc

SEQ ID NO: 49491 - RNA, 12 nt, Homo sapiens
cgcgcccucugg

SEQ ID NO: 49492 - RNA, 19 nt, Homo sapiens
cgcgcccucuggcugcugg

SEQ ID NO: 49493 - RNA, 22 nt, Homo sapiens
cgcgcccucuggcugcuggugg

SEQ ID NO: 49494 - RNA, 24 nt, Homo sapiens
cgcgcccucuggcugcugguggcg

SEQ ID NO: 49495 - RNA, 12 nt, Homo sapiens
cgcgccgcgcuc

SEQ ID NO: 49496 - RNA, 13 nt, Homo sapiens
cgcgccgcgcucc

SEQ ID NO: 49497 - RNA, 14 nt, Homo sapiens
cgcgccgcgcuccu

SEQ ID NO: 49498 - RNA, 16 nt, Homo sapiens
cgcgccgcgcuccucg

SEQ ID NO: 49499 - RNA, 12 nt, Homo sapiens
cgcgcgccacca

SEQ ID NO: 49500 - RNA, 20 nt, Homo sapiens
cgcgcgccaccacgcccagc

SEQ ID NO: 49501 - RNA, 11 nt, Homo sapiens
cgcgcgcccuc

SEQ ID NO: 49502 - RNA, 16 nt, Homo sapiens
cgcgcgcccucuggcu

SEQ ID NO: 49503 - RNA, 21 nt, Homo sapiens
cgcgcgcccucuggcugcugg

SEQ ID NO: 49504 - RNA, 11 nt, Homo sapiens
cgcgcgccucc

SEQ ID NO: 49505 - RNA, 13 nt, Homo sapiens
cgcgcgccuccgc

SEQ ID NO: 49506 - RNA, 13 nt, Homo sapiens
cgcgcgcuccgcg

SEQ ID NO: 49507 - RNA, 14 nt, Homo sapiens
cgcgcgcuccgcgc

SEQ ID NO: 49508 - RNA, 17 nt, Homo sapiens
cgcgcgcuccgcgcagc

SEQ ID NO: 49509 - RNA, 12 nt, Homo sapiens
cgcgcucauccc

SEQ ID NO: 49510 - RNA, 15 nt, Homo sapiens
cgcgcucaucccacc

SEQ ID NO: 49511 - RNA, 18 nt, Homo sapiens
cgcgcucaucccacccgc

SEQ ID NO: 49512 - RNA, 20 nt, Homo sapiens
cgcgcucaucccacccgccc

SEQ ID NO: 49513 - RNA, 21 nt, Homo sapiens
cgcgcucaucccacccgccca

SEQ ID NO: 49514 - RNA, 12 nt, Homo sapiens
cgcgcuccgcgc

SEQ ID NO: 49515 - RNA, 13 nt, Homo sapiens
cgcgcuccgcgca

SEQ ID NO: 49516 - RNA, 17 nt, Homo sapiens
cgcgcuccgcgcagcuc

SEQ ID NO: 49517 - RNA, 15 nt, Homo sapiens
cgcgcuccucggacg

SEQ ID NO: 49518 - RNA, 20 nt, Homo sapiens
cgcgcuccucggacggcucc

SEQ ID NO: 49519 - RNA, 12 nt, Homo sapiens
cgcgcugcgcgc

SEQ ID NO: 49520 - RNA, 15 nt, Homo sapiens
cgcgcugcgcgccgc

SEQ ID NO: 49521 - RNA, 16 nt, Homo sapiens
cgcgcugcgcgccgcg

SEQ ID NO: 49522 - RNA, 18 nt, Homo sapiens
cgcgcugcgcgccgcgcu

SEQ ID NO: 49523 - RNA, 18 nt, Homo sapiens
cgcggcgggagggcgcgg

SEQ ID NO: 49524 - RNA, 20 nt, Homo sapiens
cgcggcgggagggcgcgggg

SEQ ID NO: 49525 - RNA, 21 nt, Homo sapiens
cgcggcgggagggcgcggggc

SEQ ID NO: 49526 - RNA, 23 nt, Homo sapiens
cgcggcgggagggcgcggggcgg

SEQ ID NO: 49527 - RNA, 11 nt, Homo sapiens
cgcggggcggg

SEQ ID NO: 49528 - RNA, 12 nt, Homo sapiens
cgcggggcgggg

SEQ ID NO: 49529 - RNA, 15 nt, Homo sapiens
cgcggggcggggagc

SEQ ID NO: 49530 - RNA, 12 nt, Homo sapiens
cgcgugcaggca

SEQ ID NO: 49531 - RNA, 11 nt, Homo sapiens
cgcuacuucca

SEQ ID NO: 49532 - RNA, 13 nt, Homo sapiens
cgcucaucccacc

SEQ ID NO: 49533 - RNA, 17 nt, Homo sapiens
cgcucaucccacccgcc

SEQ ID NO: 49534 - RNA, 18 nt, Homo sapiens
cgcucaucccacccgccc

SEQ ID NO: 49535 - RNA, 19 nt, Homo sapiens
cgcucaucccacccgccca

SEQ ID NO: 49536 - RNA, 22 nt, Homo sapiens
cgcucaucccacccgcccaccg

SEQ ID NO: 49537 - RNA, 13 nt, Homo sapiens
cgcuccgcgcagc

SEQ ID NO: 49538 - RNA, 19 nt, Homo sapiens
cgcuccgcgcagcucaggc

SEQ ID NO: 49539 - RNA, 20 nt, Homo sapiens
cgcuccgcgcagcucaggcu

SEQ ID NO: 49540 - RNA, 12 nt, Homo sapiens
cgcuccucggac

SEQ ID NO: 49541 - RNA, 13 nt, Homo sapiens
cgcuccucggacg

SEQ ID NO: 49542 - RNA, 15 nt, Homo sapiens
cgcuccucggacggc

SEQ ID NO: 49543 - RNA, 16 nt, Homo sapiens
cgcuccucggacggcu

SEQ ID NO: 49544 - RNA, 18 nt, Homo sapiens
cgcuccucggacggcucc

SEQ ID NO: 49545 - RNA, 14 nt, Homo sapiens
cgcucgcuuccgca

SEQ ID NO: 49546 - RNA, 21 nt, Homo sapiens
cgcucgcuuccgcauccuagu

SEQ ID NO: 49547 - RNA, 10 nt, Homo sapiens
cgcucggccu

SEQ ID NO: 49548 - RNA, 12 nt, Homo sapiens
cgcucggccugc

SEQ ID NO: 49549 - RNA, 16 nt, Homo sapiens
cgcucggccugcucgc

SEQ ID NO: 49550 - RNA, 13 nt, Homo sapiens
cgcucugggucgc

SEQ ID NO: 49551 - RNA, 14 nt, Homo sapiens
cgcugcgcgccgcg

SEQ ID NO: 49552 - RNA, 15 nt, Homo sapiens
cgcugcgcgccgcgc

SEQ ID NO: 49553 - RNA, 17 nt, Homo sapiens
cgcugcgcgccgcgcuc

SEQ ID NO: 49554 - RNA, 13 nt, Homo sapiens
cgcugcugccgug

SEQ ID NO: 49555 - RNA, 19 nt, Homo sapiens
cgcugcugccgugggccug

SEQ ID NO: 49556 - RNA, 11 nt, Homo sapiens
cgcuggcugcg

SEQ ID NO: 49557 - RNA, 14 nt, Homo sapiens
cgcuggcugcgcuc

SEQ ID NO: 49558 - RNA, 15 nt, Homo sapiens
cgcuggcugcgcucg

SEQ ID NO: 49559 - RNA, 17 nt, Homo sapiens
cgcuggcugcgcucggc

SEQ ID NO: 49560 - RNA, 18 nt, Homo sapiens
cgcuggcugcgcucggcc

SEQ ID NO: 49561 - RNA, 20 nt, Homo sapiens
cgcuggcugcgcucggccug

SEQ ID NO: 49562 - RNA, 22 nt, Homo sapiens
cgcuggcugcgcucggccugcu

SEQ ID NO: 49563 - RNA, 12 nt, Homo sapiens
cgcuguuccucg

SEQ ID NO: 49564 - RNA, 14 nt, Homo sapiens
cgcuguuccucgcc

SEQ ID NO: 49565 - RNA, 15 nt, Homo sapiens
cgcuguuccucgcca

SEQ ID NO: 49566 - RNA, 17 nt, Homo sapiens
cgcuguuccucgccacg

SEQ ID NO: 49567 - RNA, 19 nt, Homo sapiens
cgcuguuccucgccacgcu

SEQ ID NO: 49568 - RNA, 20 nt, Homo sapiens
cgcuguuccucgccacgcuc

SEQ ID NO: 49569 - RNA, 22 nt, Homo sapiens
cgcuguuccucgccacgcucug

SEQ ID NO: 49570 - RNA, 15 nt, Homo sapiens
cgcuuccgcauccua

SEQ ID NO: 49571 - RNA, 15 nt, Homo sapiens
cgcuuuugauaauca

SEQ ID NO: 49572 - RNA, 12 nt, Homo sapiens
cggaacaguauc

SEQ ID NO: 49573 - RNA, 12 nt, Homo sapiens
cggacgcugcug

SEQ ID NO: 49574 - RNA, 13 nt, Homo sapiens
cggacgcugcugc

SEQ ID NO: 49575 - RNA, 14 nt, Homo sapiens
cggacgcugcugcc

SEQ ID NO: 49576 - RNA, 20 nt, Homo sapiens
cggacgcugcugccgugggc

SEQ ID NO: 49577 - RNA, 23 nt, Homo sapiens
cggacgcugcugccgugggccug

SEQ ID NO: 49578 - RNA, 15 nt, Homo sapiens
cggacggcuccggac

SEQ ID NO: 49579 - RNA, 17 nt, Homo sapiens
cggacggcuccggacgc

SEQ ID NO: 49580 - RNA, 20 nt, Homo sapiens
cggagaagagcuguucacag

SEQ ID NO: 49581 - RNA, 11 nt, Homo sapiens
cggagauaucc

SEQ ID NO: 49582 - RNA, 21 nt, Homo sapiens
cggagccccuugggcagguca

SEQ ID NO: 49583 - RNA, 17 nt, Homo sapiens
cggagccgggaaagaag

SEQ ID NO: 49584 - RNA, 20 nt, Homo sapiens
cggagccgggaaagaagagc

SEQ ID NO: 49585 - RNA, 14 nt, Homo sapiens
cggagccuccagcu

SEQ ID NO: 49586 - RNA, 18 nt, Homo sapiens
cggagccuccagcugccc

SEQ ID NO: 49587 - RNA, 19 nt, Homo sapiens
cggagccuccagcugcccc

SEQ ID NO: 49588 - RNA, 12 nt, Homo sapiens
cggcccugugcg

SEQ ID NO: 49589 - RNA, 14 nt, Homo sapiens
cggcccugugcggc

SEQ ID NO: 49590 - RNA, 15 nt, Homo sapiens
cggcccugugcggcc

SEQ ID NO: 49591 - RNA, 16 nt, Homo sapiens
cggcccugugcggccu

SEQ ID NO: 49592 - RNA, 18 nt, Homo sapiens
cggcccugugcggccugg

SEQ ID NO: 49593 - RNA, 19 nt, Homo sapiens
cggcccugugcggccuggu

SEQ ID NO: 49594 - RNA, 12 nt, Homo sapiens
cggccgcgcugc

SEQ ID NO: 49595 - RNA, 15 nt, Homo sapiens
cggccgcgcugcgcg

SEQ ID NO: 49596 - RNA, 18 nt, Homo sapiens
cggccgcgcugcgcgccg

SEQ ID NO: 49597 - RNA, 20 nt, Homo sapiens
cggccgcgcugcgcgccgcg

SEQ ID NO: 49598 - RNA, 21 nt, Homo sapiens
cggccgcgcugcgcgccgcgc

SEQ ID NO: 49599 - RNA, 22 nt, Homo sapiens
cggccgcgcugcgcgccgcgcu

SEQ ID NO: 49600 - RNA, 11 nt, Homo sapiens
cggccggcgcg

SEQ ID NO: 49601 - RNA, 13 nt, Homo sapiens
cggccggcgcgcu

SEQ ID NO: 49602 - RNA, 12 nt, Homo sapiens
cggccugcucgc

SEQ ID NO: 49603 - RNA, 14 nt, Homo sapiens
cggccugcucgccc

SEQ ID NO: 49604 - RNA, 21 nt, Homo sapiens
cggccugcucgcccacuuccu

SEQ ID NO: 49605 - RNA, 22 nt, Homo sapiens
cggccuggucuaccuguucgcg

SEQ ID NO: 49606 - RNA, 23 nt, Homo sapiens
cggccuggucuaccuguucgcgc

SEQ ID NO: 49607 - RNA, 21 nt, Homo sapiens
cggcgcgcucaucccacccgc

SEQ ID NO: 49608 - RNA, 14 nt, Homo sapiens
cggcggcccugugc

SEQ ID NO: 49609 - RNA, 17 nt, Homo sapiens
cggcggcccugugcggc

SEQ ID NO: 49610 - RNA, 18 nt, Homo sapiens
cggcggcccugugcggcc

SEQ ID NO: 49611 - RNA, 21 nt, Homo sapiens
cggcggcccugugcggccugg

SEQ ID NO: 49612 - RNA, 23 nt, Homo sapiens
cggcggcccugugcggccugguc

SEQ ID NO: 49613 - RNA, 13 nt, Homo sapiens
cggcgggagggcg

SEQ ID NO: 49614 - RNA, 18 nt, Homo sapiens
cggcgggagggcgcgggg

SEQ ID NO: 49615 - RNA, 19 nt, Homo sapiens
cggcgggagggcgcggggc

SEQ ID NO: 49616 - RNA, 20 nt, Homo sapiens
cggcgggagggcgcggggcg

SEQ ID NO: 49617 - RNA, 22 nt, Homo sapiens
cggcgggagggcgcggggcggg

SEQ ID NO: 49618 - RNA, 18 nt, Homo sapiens
cggcuccggacgcugcug

SEQ ID NO: 49619 - RNA, 19 nt, Homo sapiens
cggcuccggacgcugcugc

SEQ ID NO: 49620 - RNA, 20 nt, Homo sapiens
cggcuccggacgcugcugcc

SEQ ID NO: 49621 - RNA, 15 nt, Homo sapiens
cggcuggagcugccu

SEQ ID NO: 49622 - RNA, 13 nt, Homo sapiens
cgggaaagaagag

SEQ ID NO: 49623 - RNA, 15 nt, Homo sapiens
cgggaaagaagagcc

SEQ ID NO: 49624 - RNA, 17 nt, Homo sapiens
cgggaaagaagagccgg

SEQ ID NO: 49625 - RNA, 21 nt, Homo sapiens
cgggaaagaagagccggagcc

SEQ ID NO: 49626 - RNA, 23 nt, Homo sapiens
cgggaaagaagagccggagccuc

SEQ ID NO: 49627 - RNA, 12 nt, Homo sapiens
cgggacacaggc

SEQ ID NO: 49628 - RNA, 16 nt, Homo sapiens
cgggagggcgcggggc

SEQ ID NO: 49629 - RNA, 14 nt, Homo sapiens
cgggaguggcgcgc

SEQ ID NO: 49630 - RNA, 15 nt, Homo sapiens
cgggaguggcgcgcg

SEQ ID NO: 49631 - RNA, 16 nt, Homo sapiens
cgggaguggcgcgcgc

SEQ ID NO: 49632 - RNA, 17 nt, Homo sapiens
cgggaguggcgcgcgcc

SEQ ID NO: 49633 - RNA, 18 nt, Homo sapiens
cgggaguggcgcgcgcca

SEQ ID NO: 49634 - RNA, 20 nt, Homo sapiens
cgggaguggcgcgcgccacc

SEQ ID NO: 49635 - RNA, 11 nt, Homo sapiens
cgggcauggug

SEQ ID NO: 49636 - RNA, 12 nt, Homo sapiens
cgggcauggugg

SEQ ID NO: 49637 - RNA, 11 nt, Homo sapiens
cgggccgacgg

SEQ ID NO: 49638 - RNA, 14 nt, Homo sapiens
cgggccgacggagc

SEQ ID NO: 49639 - RNA, 19 nt, Homo sapiens
cgggccgacggagccggga

SEQ ID NO: 49640 - RNA, 13 nt, Homo sapiens
cggggagcgagcc

SEQ ID NO: 49641 - RNA, 15 nt, Homo sapiens
cggggagcgagcccc

SEQ ID NO: 49642 - RNA, 13 nt, Homo sapiens
cggggaggggcgc

SEQ ID NO: 49643 - RNA, 15 nt, Homo sapiens
cggggaggggcgcuc

SEQ ID NO: 49644 - RNA, 16 nt, Homo sapiens
cggggaggggcgcucg

SEQ ID NO: 49645 - RNA, 17 nt, Homo sapiens
cggggaggggcgcucgc

SEQ ID NO: 49646 - RNA, 19 nt, Homo sapiens
cggggaggggcgcucgcuu

SEQ ID NO: 49647 - RNA, 21 nt, Homo sapiens
cggggaggggcgcucgcuucc

SEQ ID NO: 49648 - RNA, 22 nt, Homo sapiens
cggggaggggcgcucgcuuccg

SEQ ID NO: 49649 - RNA, 19 nt, Homo sapiens
cggggcggggagcgagccc

SEQ ID NO: 49650 - RNA, 20 nt, Homo sapiens
cggggcggggagcgagcccc

SEQ ID NO: 49651 - RNA, 14 nt, Homo sapiens
cgggguuugccaug

SEQ ID NO: 49652 - RNA, 18 nt, Homo sapiens
cgggguuugccaugcugg

SEQ ID NO: 49653 - RNA, 23 nt, Homo sapiens
cgggguuugccaugcuggccagg

SEQ ID NO: 49654 - RNA, 14 nt, Homo sapiens
cggguccgggucgc

SEQ ID NO: 49655 - RNA, 19 nt, Homo sapiens
cggguccgggucgcaggac

SEQ ID NO: 49656 - RNA, 21 nt, Homo sapiens
cggguccgggucgcaggacca

SEQ ID NO: 49657 - RNA, 13 nt, Homo sapiens
cggguggaucacu

SEQ ID NO: 49658 - RNA, 21 nt, Homo sapiens
cggucacuuuacuguccccau

SEQ ID NO: 49659 - RNA, 15 nt, Homo sapiens
cgguccuugcugcac

SEQ ID NO: 49660 - RNA, 20 nt, Homo sapiens
cgguuugaaaauaugccugc

SEQ ID NO: 49661 - RNA, 21 nt, Homo sapiens
cguccccagagcuacaggccc

SEQ ID NO: 49662 - RNA, 11 nt, Homo sapiens
cguccuuccac

SEQ ID NO: 49663 - RNA, 20 nt, Homo sapiens
cguccuuccacuuccaagau

SEQ ID NO: 49664 - RNA, 18 nt, Homo sapiens
cgucucccaaagugcugg

SEQ ID NO: 49665 - RNA, 20 nt, Homo sapiens
cgucucuacuaaaaauacaa

SEQ ID NO: 49666 - RNA, 23 nt, Homo sapiens
cgucuugacuuuggcaaaugagc

SEQ ID NO: 49667 - RNA, 16 nt, Homo sapiens
cgugaccugacagccc

SEQ ID NO: 49668 - RNA, 17 nt, Homo sapiens
cgugaccugacagccca

SEQ ID NO: 49669 - RNA, 14 nt, Homo sapiens
cgugacuggccugc

SEQ ID NO: 49670 - RNA, 15 nt, Homo sapiens
cgugacuggccugcu

SEQ ID NO: 49671 - RNA, 16 nt, Homo sapiens
cgugacuggccugcug

SEQ ID NO: 49672 - RNA, 17 nt, Homo sapiens
cgugacuggccugcugg

SEQ ID NO: 49673 - RNA, 12 nt, Homo sapiens
cgugagccacca

SEQ ID NO: 49674 - RNA, 16 nt, Homo sapiens
cgugagccaccaaacc

SEQ ID NO: 49675 - RNA, 19 nt, Homo sapiens
cgugauuuugcuguagaag

SEQ ID NO: 49676 - RNA, 16 nt, Homo sapiens
cguggaacaguuaccu

SEQ ID NO: 49677 - RNA, 13 nt, Homo sapiens
cgugggccugaga

SEQ ID NO: 49678 - RNA, 17 nt, Homo sapiens
cgugggccugagaccaa

SEQ ID NO: 49679 - RNA, 19 nt, Homo sapiens
cgugguaggacuguagaaa

SEQ ID NO: 49680 - RNA, 16 nt, Homo sapiens
cgugugggcaauguuc

SEQ ID NO: 49681 - RNA, 15 nt, Homo sapiens
cguuugugauugcca

SEQ ID NO: 49682 - RNA, 17 nt, Homo sapiens
cguuugugauugccauu

SEQ ID NO: 49683 - RNA, 17 nt, Homo sapiens
cuaaaaaacaaagaaga

SEQ ID NO: 49684 - RNA, 18 nt, Homo sapiens
cuaaaaaggcauguaauu

SEQ ID NO: 49685 - RNA, 16 nt, Homo sapiens
cuaaaacaccucagcu

SEQ ID NO: 49686 - RNA, 17 nt, Homo sapiens
cuaaaacaccucagcug

SEQ ID NO: 49687 - RNA, 17 nt, Homo sapiens
cuaaaaggccugucccu

SEQ ID NO: 49688 - RNA, 18 nt, Homo sapiens
cuaaacuuucacacccca

SEQ ID NO: 49689 - RNA, 16 nt, Homo sapiens
cuaaaguguauuuuuu

SEQ ID NO: 49690 - RNA, 17 nt, Homo sapiens
cuaaaguguauuuuuuu

SEQ ID NO: 49691 - RNA, 21 nt, Homo sapiens
cuaaaguguauuuuuuuacua

SEQ ID NO: 49692 - RNA, 19 nt, Homo sapiens
cuaaauaucccuuggacau

SEQ ID NO: 49693 - RNA, 23 nt, Homo sapiens
cuaaauucuuucauuuuaggggu

SEQ ID NO: 49694 - RNA, 15 nt, Homo sapiens
cuaaauuugguucua

SEQ ID NO: 49695 - RNA, 21 nt, Homo sapiens
cuaacaggaauuuucauuguu

SEQ ID NO: 49696 - RNA, 16 nt, Homo sapiens
cuaaccagccugguca

SEQ ID NO: 49697 - RNA, 21 nt, Homo sapiens
cuaagaagugaaaaucuacac

SEQ ID NO: 49698 - RNA, 14 nt, Homo sapiens
cuaagcauuccaac

SEQ ID NO: 49699 - RNA, 18 nt, Homo sapiens
cuaaguaaaaccacagca

SEQ ID NO: 49700 - RNA, 23 nt, Homo sapiens
cuaagugaaauaagccagacauc

SEQ ID NO: 49701 - RNA, 19 nt, Homo sapiens
cuaauaaaaaggugaccau

SEQ ID NO: 49702 - RNA, 19 nt, Homo sapiens
cuaauaaaauacauacuau

SEQ ID NO: 49703 - RNA, 18 nt, Homo sapiens
cuaauagaauuaauggaa

SEQ ID NO: 49704 - RNA, 20 nt, Homo sapiens
cuaaucaauacuuugaacac

SEQ ID NO: 49705 - RNA, 22 nt, Homo sapiens
cuaauuuguuuucccuucuuac

SEQ ID NO: 49706 - RNA, 18 nt, Homo sapiens
cuaauuuuauuauaguaa

SEQ ID NO: 49707 - RNA, 13 nt, Homo sapiens
cuacaaaaacaca

SEQ ID NO: 49708 - RNA, 16 nt, Homo sapiens
cuacaaaaacacagca

SEQ ID NO: 49709 - RNA, 13 nt, Homo sapiens
cuacaauuguaaa

SEQ ID NO: 49710 - RNA, 20 nt, Homo sapiens
cuacacuaagagagaaugag

SEQ ID NO: 49711 - RNA, 14 nt, Homo sapiens
cuacacuccaguga

SEQ ID NO: 49712 - RNA, 17 nt, Homo sapiens
cuacacuccagugagac

SEQ ID NO: 49713 - RNA, 18 nt, Homo sapiens
cuacagccaggcggcugg

SEQ ID NO: 49714 - RNA, 19 nt, Homo sapiens
cuaccagcccuacaccauu

SEQ ID NO: 49715 - RNA, 16 nt, Homo sapiens
cuaccuguucgcgcgc

SEQ ID NO: 49716 - RNA, 17 nt, Homo sapiens
cuaccuguucgcgcgcc

SEQ ID NO: 49717 - RNA, 12 nt, Homo sapiens
cuacgcgcgcuc

SEQ ID NO: 49718 - RNA, 14 nt, Homo sapiens
cuacgcgcgcuccg

SEQ ID NO: 49719 - RNA, 15 nt, Homo sapiens
cuacgcgcgcuccgc

SEQ ID NO: 49720 - RNA, 16 nt, Homo sapiens
cuacgcgcgcuccgcg

SEQ ID NO: 49721 - RNA, 18 nt, Homo sapiens
cuacgcgcgcuccgcgca

SEQ ID NO: 49722 - RNA, 20 nt, Homo sapiens
cuacgcgcgcuccgcgcagc

SEQ ID NO: 49723 - RNA, 21 nt, Homo sapiens
cuacgcgcgcuccgcgcagcu

SEQ ID NO: 49724 - RNA, 24 nt, Homo sapiens
cuacucuguuccuucacauccugu

SEQ ID NO: 49725 - RNA, 16 nt, Homo sapiens
cuacuuccagggcuac

SEQ ID NO: 49726 - RNA, 19 nt, Homo sapiens
cuacuuccagggcuacgcg

SEQ ID NO: 49727 - RNA, 22 nt, Homo sapiens
cuacuuccagggcuacgcgcgc

SEQ ID NO: 49728 - RNA, 17 nt, Homo sapiens
cuagaaaacaggcaaau

SEQ ID NO: 49729 - RNA, 19 nt, Homo sapiens
cuagaaaacaggcaaauuc

SEQ ID NO: 49730 - RNA, 14 nt, Homo sapiens
cuagaauacuaaua

SEQ ID NO: 49731 - RNA, 16 nt, Homo sapiens
cuagaauucacuccac

SEQ ID NO: 49732 - RNA, 15 nt, Homo sapiens
cuagauacugaaugu

SEQ ID NO: 49733 - RNA, 17 nt, Homo sapiens
cuagcauacguacacau

SEQ ID NO: 49734 - RNA, 19 nt, Homo sapiens
cuagcccuuacguccuucc

SEQ ID NO: 49735 - RNA, 14 nt, Homo sapiens
cuagcuaauaucaa

SEQ ID NO: 49736 - RNA, 16 nt, Homo sapiens
cuagcuaauaucaaua

SEQ ID NO: 49737 - RNA, 13 nt, Homo sapiens
cuaggaaauauuu

SEQ ID NO: 49738 - RNA, 11 nt, Homo sapiens
cuaggccgggc

SEQ ID NO: 49739 - RNA, 19 nt, Homo sapiens
cuagggugauauuaaccag

SEQ ID NO: 49740 - RNA, 17 nt, Homo sapiens
cuaguaauuggaaaggc

SEQ ID NO: 49741 - RNA, 12 nt, Homo sapiens
cuaguauuucua

SEQ ID NO: 49742 - RNA, 13 nt, Homo sapiens
cuaguauuucuau

SEQ ID NO: 49743 - RNA, 14 nt, Homo sapiens
cuagucucuaucau

SEQ ID NO: 49744 - RNA, 20 nt, Homo sapiens
cuagucucuaucauuaaagu

SEQ ID NO: 49745 - RNA, 22 nt, Homo sapiens
cuagucucuaucauuaaaguuc

SEQ ID NO: 49746 - RNA, 22 nt, Homo sapiens
cuagugaaagaggcagcuugaa

SEQ ID NO: 49747 - RNA, 15 nt, Homo sapiens
cuaguuguaauuuuu

SEQ ID NO: 49748 - RNA, 17 nt, Homo sapiens
cuaguuguaauuuuuuu

SEQ ID NO: 49749 - RNA, 15 nt, Homo sapiens
cuauauccugugacu

SEQ ID NO: 49750 - RNA, 18 nt, Homo sapiens
cuauauuaucaugcaaau

SEQ ID NO: 49751 - RNA, 20 nt, Homo sapiens
cuaucaaguauuauaccuuu

SEQ ID NO: 49752 - RNA, 18 nt, Homo sapiens
cuaucauuaaaguucuag

SEQ ID NO: 49753 - RNA, 23 nt, Homo sapiens
cuauccaccaaaagggcucccug

SEQ ID NO: 49754 - RNA, 15 nt, Homo sapiens
cuaucucauuuccaa

SEQ ID NO: 49755 - RNA, 18 nt, Homo sapiens
cuaugaauaaauuuucuu

SEQ ID NO: 49756 - RNA, 21 nt, Homo sapiens
cuaugaauaaauuuucuucuu

SEQ ID NO: 49757 - RNA, 12 nt, Homo sapiens
cuaugcauuuga

SEQ ID NO: 49758 - RNA, 20 nt, Homo sapiens
cuauguagaauauauuuccu

SEQ ID NO: 49759 - RNA, 13 nt, Homo sapiens
cuaugugauuaca

SEQ ID NO: 49760 - RNA, 15 nt, Homo sapiens
cuaugugauuacaag

SEQ ID NO: 49761 - RNA, 15 nt, Homo sapiens
cuauguggcuguauc

SEQ ID NO: 49762 - RNA, 17 nt, Homo sapiens
cuauguggcuguaucuu

SEQ ID NO: 49763 - RNA, 18 nt, Homo sapiens
cuauguucuaagaaguga

SEQ ID NO: 49764 - RNA, 15 nt, Homo sapiens
cuauguuguugcacu

SEQ ID NO: 49765 - RNA, 16 nt, Homo sapiens
cuauguuguugcacuu

SEQ ID NO: 49766 - RNA, 13 nt, Homo sapiens
cuauugccaugag

SEQ ID NO: 49767 - RNA, 14 nt, Homo sapiens
cuauuuaagagaac

SEQ ID NO: 49768 - RNA, 18 nt, Homo sapiens
cuauuuaauuauuucacu

SEQ ID NO: 49769 - RNA, 19 nt, Homo sapiens
cuauuuaauuauuucacuu

SEQ ID NO: 49770 - RNA, 21 nt, Homo sapiens
cuauuuaauuauuucacuuua

SEQ ID NO: 49771 - RNA, 14 nt, Homo sapiens
cuauuuacggaacu

SEQ ID NO: 49772 - RNA, 18 nt, Homo sapiens
cuauuuacggaacucaaa

SEQ ID NO: 49773 - RNA, 18 nt, Homo sapiens
cuauuuauuaaguauuuu

SEQ ID NO: 49774 - RNA, 14 nt, Homo sapiens
cuauuuauuuauuu

SEQ ID NO: 49775 - RNA, 21 nt, Homo sapiens
cuauuuauuuauuuauucauu

SEQ ID NO: 49776 - RNA, 22 nt, Homo sapiens
cuauuuauuuauuuauucauua

SEQ ID NO: 49777 - RNA, 18 nt, Homo sapiens
cuauuuauuuauuuauuu

SEQ ID NO: 49778 - RNA, 22 nt, Homo sapiens
cuauuuauuuauuuauuuauuu

SEQ ID NO: 49779 - RNA, 11 nt, Homo sapiens
cucaaaacugc

SEQ ID NO: 49780 - RNA, 16 nt, Homo sapiens
cucaaaacugcacugu

SEQ ID NO: 49781 - RNA, 18 nt, Homo sapiens
cucaaaacuucagacaua

SEQ ID NO: 49782 - RNA, 22 nt, Homo sapiens
cucaaaauaccaugccauuuaa

SEQ ID NO: 49783 - RNA, 23 nt, Homo sapiens
cucaaauacgugggcauucaaau

SEQ ID NO: 49784 - RNA, 18 nt, Homo sapiens
cucaacauaacauaagcu

SEQ ID NO: 49785 - RNA, 16 nt, Homo sapiens
cucaaccaccuuucag

SEQ ID NO: 49786 - RNA, 15 nt, Homo sapiens
cucaagacaaaugac

SEQ ID NO: 49787 - RNA, 12 nt, Homo sapiens
cucaagccagcc

SEQ ID NO: 49788 - RNA, 21 nt, Homo sapiens
cucaauguuuagcagauuuaa

SEQ ID NO: 49789 - RNA, 13 nt, Homo sapiens
cucacaagcacuu

SEQ ID NO: 49790 - RNA, 14 nt, Homo sapiens
cucacaagcacuuu

SEQ ID NO: 49791 - RNA, 12 nt, Homo sapiens
cucaccugugag

SEQ ID NO: 49792 - RNA, 12 nt, Homo sapiens
cucacuuugaag

SEQ ID NO: 49793 - RNA, 21 nt, Homo sapiens
cucacuuugaagagugugagg

SEQ ID NO: 49794 - RNA, 15 nt, Homo sapiens
cucagaaacaucagu

SEQ ID NO: 49795 - RNA, 21 nt, Homo sapiens
cucagcuaaugaaguguuuag

SEQ ID NO: 49796 - RNA, 16 nt, Homo sapiens
cucagcugccucccca

SEQ ID NO: 49797 - RNA, 17 nt, Homo sapiens
cucaggcuggcaccgcu

SEQ ID NO: 49798 - RNA, 14 nt, Homo sapiens
cucagguguccgcu

SEQ ID NO: 49799 - RNA, 21 nt, Homo sapiens
cucagugucaaugcagccccc

SEQ ID NO: 49800 - RNA, 20 nt, Homo sapiens
cucaguguccucaucuguaa

SEQ ID NO: 49801 - RNA, 16 nt, Homo sapiens
cucaguugcagcccug

SEQ ID NO: 49802 - RNA, 13 nt, Homo sapiens
cucaucaaucaaa

SEQ ID NO: 49803 - RNA, 14 nt, Homo sapiens
cucaucccacccgc

SEQ ID NO: 49804 - RNA, 16 nt, Homo sapiens
cucaucccacccgccc

SEQ ID NO: 49805 - RNA, 19 nt, Homo sapiens
cucauggaauuggagcucg

SEQ ID NO: 49806 - RNA, 20 nt, Homo sapiens
cucauggaauuggagcucgu

SEQ ID NO: 49807 - RNA, 23 nt, Homo sapiens
cucauggaauuggagcucgugga

SEQ ID NO: 49808 - RNA, 12 nt, Homo sapiens
cucauucaaaag

SEQ ID NO: 49809 - RNA, 21 nt, Homo sapiens
cucauuuauuuccauauuaaa

SEQ ID NO: 49810 - RNA, 20 nt, Homo sapiens
cucauuuuaaaaaauggaac

SEQ ID NO: 49811 - RNA, 17 nt, Homo sapiens
cucauuuuuguuuucau

SEQ ID NO: 49812 - RNA, 14 nt, Homo sapiens
cuccaaacuggagc

SEQ ID NO: 49813 - RNA, 15 nt, Homo sapiens
cuccaaacuggagcu

SEQ ID NO: 49814 - RNA, 22 nt, Homo sapiens
cuccaaagaaauguaagggaaa

SEQ ID NO: 49815 - RNA, 15 nt, Homo sapiens
cuccaagaauuucua

SEQ ID NO: 49816 - RNA, 21 nt, Homo sapiens
cuccaccuuacuucuucucau

SEQ ID NO: 49817 - RNA, 12 nt, Homo sapiens
cuccaccuucug

SEQ ID NO: 49818 - RNA, 14 nt, Homo sapiens
cuccaccuucuggg

SEQ ID NO: 49819 - RNA, 16 nt, Homo sapiens
cuccaccuucuggguu

SEQ ID NO: 49820 - RNA, 18 nt, Homo sapiens
cuccacuuggacaugggc

SEQ ID NO: 49821 - RNA, 17 nt, Homo sapiens
cuccagccucagcucuc

SEQ ID NO: 49822 - RNA, 13 nt, Homo sapiens
cuccagccugagc

SEQ ID NO: 49823 - RNA, 15 nt, Homo sapiens
cuccagccugagcga

SEQ ID NO: 49824 - RNA, 16 nt, Homo sapiens
cuccagccugagcgac

SEQ ID NO: 49825 - RNA, 12 nt, Homo sapiens
cuccagcugccc

SEQ ID NO: 49826 - RNA, 13 nt, Homo sapiens
cuccagcugcccc

SEQ ID NO: 49827 - RNA, 15 nt, Homo sapiens
cuccagugagacagc

SEQ ID NO: 49828 - RNA, 20 nt, Homo sapiens
cuccagugagacagcucugc

SEQ ID NO: 49829 - RNA, 21 nt, Homo sapiens
cuccagugagacagcucugca

SEQ ID NO: 49830 - RNA, 20 nt, Homo sapiens
cuccaugaauaucaguuauu

SEQ ID NO: 49831 - RNA, 20 nt, Homo sapiens
cuccauggggugggggugga

SEQ ID NO: 49832 - RNA, 16 nt, Homo sapiens
cucccaaagugcuggg

SEQ ID NO: 49833 - RNA, 15 nt, Homo sapiens
cucccagucauuuaa

SEQ ID NO: 49834 - RNA, 15 nt, Homo sapiens
cucccauucacagau

SEQ ID NO: 49835 - RNA, 11 nt, Homo sapiens
cucccggccgc

SEQ ID NO: 49836 - RNA, 14 nt, Homo sapiens
cucccggccgcgcu

SEQ ID NO: 49837 - RNA, 16 nt, Homo sapiens
cucccggccgcgcugc

SEQ ID NO: 49838 - RNA, 22 nt, Homo sapiens
cucccuauuuuuuuucuguuau

SEQ ID NO: 49839 - RNA, 23 nt, Homo sapiens
cucccuauuuuuuuucuguuaua

SEQ ID NO: 49840 - RNA, 24 nt, Homo sapiens
cucccuauuuuuuuucuguuauau

SEQ ID NO: 49841 - RNA, 12 nt, Homo sapiens
cuccgcauccuc

SEQ ID NO: 49842 - RNA, 21 nt, Homo sapiens
cuccgcauccuccuccugcuu

SEQ ID NO: 49843 - RNA, 19 nt, Homo sapiens
cuccgcgcagcucaggcug

SEQ ID NO: 49844 - RNA, 14 nt, Homo sapiens
cuccgcuacuucca

SEQ ID NO: 49845 - RNA, 15 nt, Homo sapiens
cuccgcuacuuccag

SEQ ID NO: 49846 - RNA, 16 nt, Homo sapiens
cuccgcuacuuccagg

SEQ ID NO: 49847 - RNA, 14 nt, Homo sapiens
cuccggacgcugcu

SEQ ID NO: 49848 - RNA, 16 nt, Homo sapiens
cuccggacgcugcugc

SEQ ID NO: 49849 - RNA, 18 nt, Homo sapiens
cuccggacgcugcugccg

SEQ ID NO: 49850 - RNA, 23 nt, Homo sapiens
cuccggacgcugcugccgugggc

SEQ ID NO: 49851 - RNA, 14 nt, Homo sapiens
cuccgucucccaaa

SEQ ID NO: 49852 - RNA, 14 nt, Homo sapiens
cuccuccuucaugg

SEQ ID NO: 49853 - RNA, 13 nt, Homo sapiens
cuccucggacggc

SEQ ID NO: 49854 - RNA, 14 nt, Homo sapiens
cuccucggacggcu

SEQ ID NO: 49855 - RNA, 16 nt, Homo sapiens
cuccucggacggcucc

SEQ ID NO: 49856 - RNA, 22 nt, Homo sapiens
cuccucggacggcuccggacgc

SEQ ID NO: 49857 - RNA, 23 nt, Homo sapiens
cuccugagacacaugggugcuau

SEQ ID NO: 49858 - RNA, 10 nt, Homo sapiens
cuccugccuc

SEQ ID NO: 49859 - RNA, 23 nt, Homo sapiens
cuccuggcuggggccuguugaag

SEQ ID NO: 49860 - RNA, 16 nt, Homo sapiens
cuccuuguguuacuaa

SEQ ID NO: 49861 - RNA, 12 nt, Homo sapiens
cucgaacugcug

SEQ ID NO: 49862 - RNA, 14 nt, Homo sapiens
cucgaacugcugga

SEQ ID NO: 49863 - RNA, 15 nt, Homo sapiens
cucgaacugcuggau

SEQ ID NO: 49864 - RNA, 11 nt, Homo sapiens
cucgaaucacu

SEQ ID NO: 49865 - RNA, 14 nt, Homo sapiens
cucgaaucacucau

SEQ ID NO: 49866 - RNA, 15 nt, Homo sapiens
cucgcccacuuccuc

SEQ ID NO: 49867 - RNA, 11 nt, Homo sapiens
cucgcuuccgc

SEQ ID NO: 49868 - RNA, 22 nt, Homo sapiens
cucgcuuccgcauccuagucuc

SEQ ID NO: 49869 - RNA, 14 nt, Homo sapiens
cucggacggcuccg

SEQ ID NO: 49870 - RNA, 15 nt, Homo sapiens
cucggacggcuccgg

SEQ ID NO: 49871 - RNA, 18 nt, Homo sapiens
cucggacggcuccggacg

SEQ ID NO: 49872 - RNA, 19 nt, Homo sapiens
cucggacggcuccggacgc

SEQ ID NO: 49873 - RNA, 22 nt, Homo sapiens
cucggagggauuccccuaaccu

SEQ ID NO: 49874 - RNA, 12 nt, Homo sapiens
cucggccugcuc

SEQ ID NO: 49875 - RNA, 13 nt, Homo sapiens
cucggccugcucg

SEQ ID NO: 49876 - RNA, 15 nt, Homo sapiens
cucggccugcucgcc

SEQ ID NO: 49877 - RNA, 16 nt, Homo sapiens
cucggccugcucgccc

SEQ ID NO: 49878 - RNA, 21 nt, Homo sapiens
cucggccugcucgcccacuuc

SEQ ID NO: 49879 - RNA, 22 nt, Homo sapiens
cucggccugcucgcccacuucc

SEQ ID NO: 49880 - RNA, 13 nt, Homo sapiens
cucguggaacagu

SEQ ID NO: 49881 - RNA, 13 nt, Homo sapiens
cucuaaaugucaa

SEQ ID NO: 49882 - RNA, 20 nt, Homo sapiens
cucuacuaaaaauacaaaaa

SEQ ID NO: 49883 - RNA, 13 nt, Homo sapiens
cucuaggaaauau

SEQ ID NO: 49884 - RNA, 20 nt, Homo sapiens
cucucacuuguuuuauuuaa

SEQ ID NO: 49885 - RNA, 15 nt, Homo sapiens
cucuccaugauccca

SEQ ID NO: 49886 - RNA, 23 nt, Homo sapiens
cucuccaugaucccaccucccau

SEQ ID NO: 49887 - RNA, 14 nt, Homo sapiens
cucucugaccuccu

SEQ ID NO: 49888 - RNA, 19 nt, Homo sapiens
cucucuuauagaauauuua

SEQ ID NO: 49889 - RNA, 14 nt, Homo sapiens
cucucuuguagcuc

SEQ ID NO: 49890 - RNA, 21 nt, Homo sapiens
cucucuuuuuagagaaauuug

SEQ ID NO: 49891 - RNA, 22 nt, Homo sapiens
cucugaagaguggguuucacaa

SEQ ID NO: 49892 - RNA, 19 nt, Homo sapiens
cucugaaggguaauuauau

SEQ ID NO: 49893 - RNA, 23 nt, Homo sapiens
cucugaccuccuccuucauggca

SEQ ID NO: 49894 - RNA, 21 nt, Homo sapiens
cucugauacagaaaaguugaa

SEQ ID NO: 49895 - RNA, 22 nt, Homo sapiens
cucugauacagaaaaguugaau

SEQ ID NO: 49896 - RNA, 19 nt, Homo sapiens
cucugcuauuugcuguuau

SEQ ID NO: 49897 - RNA, 12 nt, Homo sapiens
cucuggaaacca

SEQ ID NO: 49898 - RNA, 16 nt, Homo sapiens
cucuggaagccucuau

SEQ ID NO: 49899 - RNA, 22 nt, Homo sapiens
cucuggaagccucuauugccau

SEQ ID NO: 49900 - RNA, 17 nt, Homo sapiens
cucuggcgacaguuuuc

SEQ ID NO: 49901 - RNA, 14 nt, Homo sapiens
cucuggcugcuggu

SEQ ID NO: 49902 - RNA, 21 nt, Homo sapiens
cucuggcugcugguggcgcug

SEQ ID NO: 49903 - RNA, 23 nt, Homo sapiens
cucuggcugcugguggcgcuggc

SEQ ID NO: 49904 - RNA, 14 nt, Homo sapiens
cucugggucgccgg

SEQ ID NO: 49905 - RNA, 15 nt, Homo sapiens
cucugggucgccggc

SEQ ID NO: 49906 - RNA, 13 nt, Homo sapiens
cucugggucucag

SEQ ID NO: 49907 - RNA, 18 nt, Homo sapiens
cucugucucaguccauga

SEQ ID NO: 49908 - RNA, 21 nt, Homo sapiens
cucugugaacgauuuagaaag

SEQ ID NO: 49909 - RNA, 17 nt, Homo sapiens
cucuguuccuucacauc

SEQ ID NO: 49910 - RNA, 13 nt, Homo sapiens
cucuuaagaagac

SEQ ID NO: 49911 - RNA, 16 nt, Homo sapiens
cucuuaagaagacugc

SEQ ID NO: 49912 - RNA, 23 nt, Homo sapiens
cucuugcaauucaauacagauca

SEQ ID NO: 49913 - RNA, 16 nt, Homo sapiens
cucuuuauucagcccc

SEQ ID NO: 49914 - RNA, 17 nt, Homo sapiens
cugaaaacccuugccau

SEQ ID NO: 49915 - RNA, 12 nt, Homo sapiens
cugaaauuuccu

SEQ ID NO: 49916 - RNA, 22 nt, Homo sapiens
cugaaccauggucggaaaacau

SEQ ID NO: 49917 - RNA, 15 nt, Homo sapiens
cugaaccguuuguga

SEQ ID NO: 49918 - RNA, 13 nt, Homo sapiens
cugaagaagcacc

SEQ ID NO: 49919 - RNA, 14 nt, Homo sapiens
cugaagaagcacca

SEQ ID NO: 49920 - RNA, 21 nt, Homo sapiens
cugaagaguggguuucacaag

SEQ ID NO: 49921 - RNA, 17 nt, Homo sapiens
cugaagggcaucaugca

SEQ ID NO: 49922 - RNA, 20 nt, Homo sapiens
cugaagggcaucaugcaucu

SEQ ID NO: 49923 - RNA, 12 nt, Homo sapiens
cugaauuucuuu

SEQ ID NO: 49924 - RNA, 13 nt, Homo sapiens
cugaauuucuuuu

SEQ ID NO: 49925 - RNA, 14 nt, Homo sapiens
cugacucuuaagaa

SEQ ID NO: 49926 - RNA, 16 nt, Homo sapiens
cugagacacaugggug

SEQ ID NO: 49927 - RNA, 20 nt, Homo sapiens
cugagaccaaggcccccggg

SEQ ID NO: 49928 - RNA, 21 nt, Homo sapiens
cugagaccaaggcccccgggc

SEQ ID NO: 49929 - RNA, 22 nt, Homo sapiens
cugagaccaaggcccccgggcc

SEQ ID NO: 49930 - RNA, 19 nt, Homo sapiens
cugagaccagccaaccugg

SEQ ID NO: 49931 - RNA, 20 nt, Homo sapiens
cugagaccagccaaccuggg

SEQ ID NO: 49932 - RNA, 23 nt, Homo sapiens
cugagaccagccaaccugggggc

SEQ ID NO: 49933 - RNA, 18 nt, Homo sapiens
cugagaugugaacacauc

SEQ ID NO: 49934 - RNA, 23 nt, Homo sapiens
cugagaugugaacacaucagcuu

SEQ ID NO: 49935 - RNA, 16 nt, Homo sapiens
cugagcagauguaaua

SEQ ID NO: 49936 - RNA, 10 nt, Homo sapiens
cugagcaguc

SEQ ID NO: 49937 - RNA, 20 nt, Homo sapiens
cugagcccggaaacuccaca

SEQ ID NO: 49938 - RNA, 20 nt, Homo sapiens
cugagcccuacugugucuca

SEQ ID NO: 49939 - RNA, 14 nt, Homo sapiens
cugagcgacaguga

SEQ ID NO: 49940 - RNA, 15 nt, Homo sapiens
cugagcgacagugag

SEQ ID NO: 49941 - RNA, 18 nt, Homo sapiens
cugagcggaccuucccag

SEQ ID NO: 49942 - RNA, 22 nt, Homo sapiens
cugaggcaagagaauugcuuga

SEQ ID NO: 49943 - RNA, 12 nt, Homo sapiens
cugaggcgggug

SEQ ID NO: 49944 - RNA, 13 nt, Homo sapiens
cugaggcgggugg

SEQ ID NO: 49945 - RNA, 17 nt, Homo sapiens
cugaguacguugugcau

SEQ ID NO: 49946 - RNA, 21 nt, Homo sapiens
cugaguguugccuaauuuguu

SEQ ID NO: 49947 - RNA, 20 nt, Homo sapiens
cugauaaagaugagugagca

SEQ ID NO: 49948 - RNA, 16 nt, Homo sapiens
cugauacccuuugaaa

SEQ ID NO: 49949 - RNA, 14 nt, Homo sapiens
cugauguaaguaaa

SEQ ID NO: 49950 - RNA, 16 nt, Homo sapiens
cugauuuuccuggaca

SEQ ID NO: 49951 - RNA, 23 nt, Homo sapiens
cugcaacaugccagccacuguga

SEQ ID NO: 49952 - RNA, 11 nt, Homo sapiens
cugcaaccugu

SEQ ID NO: 49953 - RNA, 20 nt, Homo sapiens
cugcaacuacuauccaacuu

SEQ ID NO: 49954 - RNA, 13 nt, Homo sapiens
cugcaacucugaa

SEQ ID NO: 49955 - RNA, 17 nt, Homo sapiens
cugcaacucugaagggu

SEQ ID NO: 49956 - RNA, 15 nt, Homo sapiens
cugcaagcuuuucaa

SEQ ID NO: 49957 - RNA, 19 nt, Homo sapiens
cugcaaucugagccagugc

SEQ ID NO: 49958 - RNA, 15 nt, Homo sapiens
cugcaaucuucucag

SEQ ID NO: 49959 - RNA, 23 nt, Homo sapiens
cugcaaucuucucagaaggcaaa

SEQ ID NO: 49960 - RNA, 13 nt, Homo sapiens
cugcaauuccacu

SEQ ID NO: 49961 - RNA, 12 nt, Homo sapiens
cugcacacuguc

SEQ ID NO: 49962 - RNA, 22 nt, Homo sapiens
cugcacaucaaaauaugcccca

SEQ ID NO: 49963 - RNA, 19 nt, Homo sapiens
cugcacuccagccugagcg

SEQ ID NO: 49964 - RNA, 17 nt, Homo sapiens
cugcacugucaagauga

SEQ ID NO: 49965 - RNA, 14 nt, Homo sapiens
cugcagacaugaga

SEQ ID NO: 49966 - RNA, 21 nt, Homo sapiens
cugcagacaugagagacagca

SEQ ID NO: 49967 - RNA, 18 nt, Homo sapiens
cugcagccccugggacca

SEQ ID NO: 49968 - RNA, 19 nt, Homo sapiens
cugcagccccugggaccag

SEQ ID NO: 49969 - RNA, 18 nt, Homo sapiens
cugcagcgaguacuuccc

SEQ ID NO: 49970 - RNA, 20 nt, Homo sapiens
cugcagcgaguacuucccgc

SEQ ID NO: 49971 - RNA, 22 nt, Homo sapiens
cugcagcgaguacuucccgcug

SEQ ID NO: 49972 - RNA, 22 nt, Homo sapiens
cugcaggcgugaccugacagcc

SEQ ID NO: 49973 - RNA, 22 nt, Homo sapiens
cugcauacucauuaggauggcu

SEQ ID NO: 49974 - RNA, 11 nt, Homo sapiens
cugcaucagcu

SEQ ID NO: 49975 - RNA, 18 nt, Homo sapiens
cugccaauauccuaauaa

SEQ ID NO: 49976 - RNA, 15 nt, Homo sapiens
cugccaucauuuacu

SEQ ID NO: 49977 - RNA, 15 nt, Homo sapiens
cugccaugcucucca

SEQ ID NO: 49978 - RNA, 11 nt, Homo sapiens
cugccccgggg

SEQ ID NO: 49979 - RNA, 22 nt, Homo sapiens
cugccccggggaggggcgcucg

SEQ ID NO: 49980 - RNA, 23 nt, Homo sapiens
cugccccggggaggggcgcucgc

SEQ ID NO: 49981 - RNA, 24 nt, Homo sapiens
cugccccggggaggggcgcucgcu

SEQ ID NO: 49982 - RNA, 13 nt, Homo sapiens
cugccccugagcc

SEQ ID NO: 49983 - RNA, 16 nt, Homo sapiens
cugccccugagcccau

SEQ ID NO: 49984 - RNA, 17 nt, Homo sapiens
cugcccuuccccuuccc

SEQ ID NO: 49985 - RNA, 23 nt, Homo sapiens
cugccgguuugaaaauaugccug

SEQ ID NO: 49986 - RNA, 13 nt, Homo sapiens
cugccgugggccu

SEQ ID NO: 49987 - RNA, 17 nt, Homo sapiens
cugccuaagugcagccc

SEQ ID NO: 49988 - RNA, 22 nt, Homo sapiens
cugccuaagugcagccccgugg

SEQ ID NO: 49989 - RNA, 12 nt, Homo sapiens
cugccucaauca

SEQ ID NO: 49990 - RNA, 13 nt, Homo sapiens
cugccucaaucag

SEQ ID NO: 49991 - RNA, 13 nt, Homo sapiens
cugccucaccucu

SEQ ID NO: 49992 - RNA, 23 nt, Homo sapiens
cugccucaccucucaccucccaa

SEQ ID NO: 49993 - RNA, 18 nt, Homo sapiens
cugccuccccagcucuau

SEQ ID NO: 49994 - RNA, 14 nt, Homo sapiens
cugccugcccugaa

SEQ ID NO: 49995 - RNA, 15 nt, Homo sapiens
cugccugcccugaaa

SEQ ID NO: 49996 - RNA, 20 nt, Homo sapiens
cugccuggacuuggccccug

SEQ ID NO: 49997 - RNA, 19 nt, Homo sapiens
cugccuugguauagcauau

SEQ ID NO: 49998 - RNA, 21 nt, Homo sapiens
cugccuuguuuaauguuaauu

SEQ ID NO: 49999 - RNA, 12 nt, Homo sapiens
cugcgcgccgcg

SEQ ID NO: 50000 - RNA, 14 nt, Homo sapiens
cugcgcgccgcgcu

SEQ ID NO: 50001 - RNA, 16 nt, Homo sapiens
cugcgcgccgcgcucc

SEQ ID NO: 50002 - RNA, 20 nt, Homo sapiens
cugcgcgccgcgcuccucgg

SEQ ID NO: 50003 - RNA, 12 nt, Homo sapiens
cugcgcucggcc

SEQ ID NO: 50004 - RNA, 14 nt, Homo sapiens
cugcgcucggccug

SEQ ID NO: 50005 - RNA, 15 nt, Homo sapiens
cugcgcucggccugc

SEQ ID NO: 50006 - RNA, 18 nt, Homo sapiens
cugcgcucggccugcucg

SEQ ID NO: 50007 - RNA, 19 nt, Homo sapiens
cugcgcucggccugcucgc

SEQ ID NO: 50008 - RNA, 21 nt, Homo sapiens
cugcuacucuguuccuucaca

SEQ ID NO: 50009 - RNA, 22 nt, Homo sapiens
cugcuaugcuauugaaguuuug

SEQ ID NO: 50010 - RNA, 17 nt, Homo sapiens
cugcuauuugcuguuau

SEQ ID NO: 50011 - RNA, 18 nt, Homo sapiens
cugcuauuugcuguuauu

SEQ ID NO: 50012 - RNA, 19 nt, Homo sapiens
cugcuauuugcuguuauuu

SEQ ID NO: 50013 - RNA, 19 nt, Homo sapiens
cugcucgcccacuuccucc

SEQ ID NO: 50014 - RNA, 14 nt, Homo sapiens
cugcugcccuuccc

SEQ ID NO: 50015 - RNA, 14 nt, Homo sapiens
cugcugccgugggc

SEQ ID NO: 50016 - RNA, 15 nt, Homo sapiens
cugcugccgugggcc

SEQ ID NO: 50017 - RNA, 18 nt, Homo sapiens
cugcugccgugggccuga

SEQ ID NO: 50018 - RNA, 21 nt, Homo sapiens
cugcuggauguggagggggcg

SEQ ID NO: 50019 - RNA, 19 nt, Homo sapiens
cugcuggauucaagugauc

SEQ ID NO: 50020 - RNA, 13 nt, Homo sapiens
cugcugguggcgc

SEQ ID NO: 50021 - RNA, 16 nt, Homo sapiens
cugcugguggcgcugg

SEQ ID NO: 50022 - RNA, 19 nt, Homo sapiens
cugcugguggcgcuggcug

SEQ ID NO: 50023 - RNA, 24 nt, Homo sapiens
cugcugguggcgcuggcugcgcuc

SEQ ID NO: 50024 - RNA, 17 nt, Homo sapiens
cugcuguuuccuagcgc

SEQ ID NO: 50025 - RNA, 18 nt, Homo sapiens
cugcuguuuccuagcgca

SEQ ID NO: 50026 - RNA, 20 nt, Homo sapiens
cugcuguuuccuagcgcagc

SEQ ID NO: 50027 - RNA, 21 nt, Homo sapiens
cugcuguuuccuagcgcagcc

SEQ ID NO: 50028 - RNA, 14 nt, Homo sapiens
cugcuuuaauuuca

SEQ ID NO: 50029 - RNA, 14 nt, Homo sapiens
cugcuuucaucuug

SEQ ID NO: 50030 - RNA, 22 nt, Homo sapiens
cuggaaaccacauggcuucacc

SEQ ID NO: 50031 - RNA, 15 nt, Homo sapiens
cuggaacucucgagc

SEQ ID NO: 50032 - RNA, 16 nt, Homo sapiens
cuggaacucucgagcg

SEQ ID NO: 50033 - RNA, 13 nt, Homo sapiens
cuggaagccucua

SEQ ID NO: 50034 - RNA, 19 nt, Homo sapiens
cuggaagccucuauugcca

SEQ ID NO: 50035 - RNA, 23 nt, Homo sapiens
cuggaagccucuauugccaugag

SEQ ID NO: 50036 - RNA, 17 nt, Homo sapiens
cuggacuuuccagagac

SEQ ID NO: 50037 - RNA, 18 nt, Homo sapiens
cuggacuuuccagagacc

SEQ ID NO: 50038 - RNA, 16 nt, Homo sapiens
cuggagugcaguggcg

SEQ ID NO: 50039 - RNA, 18 nt, Homo sapiens
cuggagugcaguggcgca

SEQ ID NO: 50040 - RNA, 20 nt, Homo sapiens
cuggagugcaguggcgcaau

SEQ ID NO: 50041 - RNA, 19 nt, Homo sapiens
cuggaucucacaagcacuu

SEQ ID NO: 50042 - RNA, 20 nt, Homo sapiens
cuggaucucacaagcacuuu

SEQ ID NO: 50043 - RNA, 20 nt, Homo sapiens
cuggauugcgccuaaugugu

SEQ ID NO: 50044 - RNA, 15 nt, Homo sapiens
cuggcacaguuuucu

SEQ ID NO: 50045 - RNA, 21 nt, Homo sapiens
cuggcaccgcuguacgcgagc

SEQ ID NO: 50046 - RNA, 16 nt, Homo sapiens
cuggcacuugggacaa

SEQ ID NO: 50047 - RNA, 17 nt, Homo sapiens
cuggcacuugggacaaa

SEQ ID NO: 50048 - RNA, 16 nt, Homo sapiens
cuggccaacgggguga

SEQ ID NO: 50049 - RNA, 18 nt, Homo sapiens
cuggccaggcuggucucg

SEQ ID NO: 50050 - RNA, 13 nt, Homo sapiens
cuggccugcugga

SEQ ID NO: 50051 - RNA, 14 nt, Homo sapiens
cuggccugcuggau

SEQ ID NO: 50052 - RNA, 15 nt, Homo sapiens
cuggccugcuggaug

SEQ ID NO: 50053 - RNA, 20 nt, Homo sapiens
cuggcgacaguuuuccuucu

SEQ ID NO: 50054 - RNA, 21 nt, Homo sapiens
cuggcucccuggaagagauca

SEQ ID NO: 50055 - RNA, 12 nt, Homo sapiens
cuggcugcgcuc

SEQ ID NO: 50056 - RNA, 15 nt, Homo sapiens
cuggcugcgcucggc

SEQ ID NO: 50057 - RNA, 22 nt, Homo sapiens
cuggcugcgcucggccugcucg

SEQ ID NO: 50058 - RNA, 23 nt, Homo sapiens
cuggcugcgcucggccugcucgc

SEQ ID NO: 50059 - RNA, 24 nt, Homo sapiens
cuggcugcgcucggccugcucgcc

SEQ ID NO: 50060 - RNA, 14 nt, Homo sapiens
cuggcugcuggugg

SEQ ID NO: 50061 - RNA, 16 nt, Homo sapiens
cuggcugcugguggcg

SEQ ID NO: 50062 - RNA, 18 nt, Homo sapiens
cuggcugcugguggcgcu

SEQ ID NO: 50063 - RNA, 20 nt, Homo sapiens
cuggcugcugguggcgcugg

SEQ ID NO: 50064 - RNA, 23 nt, Homo sapiens
cuggcugggaguggcauguauga

SEQ ID NO: 50065 - RNA, 15 nt, Homo sapiens
cuggcuggggccugu

SEQ ID NO: 50066 - RNA, 19 nt, Homo sapiens
cugggaauuacaggcguga

SEQ ID NO: 50067 - RNA, 20 nt, Homo sapiens
cugggaauuacaggcgugag

SEQ ID NO: 50068 - RNA, 22 nt, Homo sapiens
cugggaauuacaggcgugagcc

SEQ ID NO: 50069 - RNA, 11 nt, Homo sapiens
cugggacaggg

SEQ ID NO: 50070 - RNA, 15 nt, Homo sapiens
cugggagccccaauu

SEQ ID NO: 50071 - RNA, 19 nt, Homo sapiens
cugggauagcugacccagc

SEQ ID NO: 50072 - RNA, 14 nt, Homo sapiens
cuggggcucuggga

SEQ ID NO: 50073 - RNA, 20 nt, Homo sapiens
cuggggcucugggauagcug

SEQ ID NO: 50074 - RNA, 21 nt, Homo sapiens
cugggguggguggggcagugc

SEQ ID NO: 50075 - RNA, 13 nt, Homo sapiens
cugggucgccggc

SEQ ID NO: 50076 - RNA, 14 nt, Homo sapiens
cugggucgccggca

SEQ ID NO: 50077 - RNA, 17 nt, Homo sapiens
cugggucucaguguccu

SEQ ID NO: 50078 - RNA, 16 nt, Homo sapiens
cuggguuccugcaaug

SEQ ID NO: 50079 - RNA, 15 nt, Homo sapiens
cugguaacauagguu

SEQ ID NO: 50080 - RNA, 21 nt, Homo sapiens
cugguccuaagucccugcugc

SEQ ID NO: 50081 - RNA, 22 nt, Homo sapiens
cuggucuaccuguucgcgcgcc

SEQ ID NO: 50082 - RNA, 18 nt, Homo sapiens
cuggucucgaacugcugg

SEQ ID NO: 50083 - RNA, 12 nt, Homo sapiens
cugguggcgcug

SEQ ID NO: 50084 - RNA, 14 nt, Homo sapiens
cugguggcgcuggc

SEQ ID NO: 50085 - RNA, 16 nt, Homo sapiens
cugguggcgcuggcug

SEQ ID NO: 50086 - RNA, 18 nt, Homo sapiens
cugguggcgcuggcugcg

SEQ ID NO: 50087 - RNA, 19 nt, Homo sapiens
cugguggcgcuggcugcgc

SEQ ID NO: 50088 - RNA, 22 nt, Homo sapiens
cugguggcgcuggcugcgcucg

SEQ ID NO: 50089 - RNA, 15 nt, Homo sapiens
cugguucuucuuggu

SEQ ID NO: 50090 - RNA, 17 nt, Homo sapiens
cuguaaaauggagacac

SEQ ID NO: 50091 - RNA, 19 nt, Homo sapiens
cuguaaaauggagacacca

SEQ ID NO: 50092 - RNA, 22 nt, Homo sapiens
cuguaaaauggagacaccacca

SEQ ID NO: 50093 - RNA, 24 nt, Homo sapiens
cuguaaaauggagacaccaccacc

SEQ ID NO: 50094 - RNA, 20 nt, Homo sapiens
cuguaaagcuuugugcagau

SEQ ID NO: 50095 - RNA, 12 nt, Homo sapiens
cuguaagaaaau

SEQ ID NO: 50096 - RNA, 17 nt, Homo sapiens
cuguaaucccagcacuu

SEQ ID NO: 50097 - RNA, 21 nt, Homo sapiens
cuguaaucccagcacuuuggg

SEQ ID NO: 50098 - RNA, 18 nt, Homo sapiens
cuguaaucccagcuacuu

SEQ ID NO: 50099 - RNA, 21 nt, Homo sapiens
cuguaaucccagcuacuuggg

SEQ ID NO: 50100 - RNA, 17 nt, Homo sapiens
cuguaauuugugauaca

SEQ ID NO: 50101 - RNA, 18 nt, Homo sapiens
cuguacaugaaaacacau

SEQ ID NO: 50102 - RNA, 16 nt, Homo sapiens
cuguacgcgagcgcgc

SEQ ID NO: 50103 - RNA, 17 nt, Homo sapiens
cuguacgcgagcgcgcg

SEQ ID NO: 50104 - RNA, 20 nt, Homo sapiens
cuguacgcgagcgcgcgcgc

SEQ ID NO: 50105 - RNA, 23 nt, Homo sapiens
cuguacgcgagcgcgcgcgcccu

SEQ ID NO: 50106 - RNA, 15 nt, Homo sapiens
cuguacuuuuuccag

SEQ ID NO: 50107 - RNA, 22 nt, Homo sapiens
cuguagaaaagggaacugaaca

SEQ ID NO: 50108 - RNA, 19 nt, Homo sapiens
cuguaucuuguuuuuccac

SEQ ID NO: 50109 - RNA, 14 nt, Homo sapiens
cuguccauucuucc

SEQ ID NO: 50110 - RNA, 23 nt, Homo sapiens
cugucccagcgagggacaccgag

SEQ ID NO: 50111 - RNA, 22 nt, Homo sapiens
cuguccccaucaucacccagca

SEQ ID NO: 50112 - RNA, 17 nt, Homo sapiens
cuguccuauuauauuca

SEQ ID NO: 50113 - RNA, 19 nt, Homo sapiens
cugucuggacuuuccagag

SEQ ID NO: 50114 - RNA, 14 nt, Homo sapiens
cugugauagaggcu

SEQ ID NO: 50115 - RNA, 11 nt, Homo sapiens
cugugcggccu

SEQ ID NO: 50116 - RNA, 13 nt, Homo sapiens
cugugcggccugg

SEQ ID NO: 50117 - RNA, 15 nt, Homo sapiens
cuguggccaaguucu

SEQ ID NO: 50118 - RNA, 19 nt, Homo sapiens
cugugucaguggaugcugc

SEQ ID NO: 50119 - RNA, 16 nt, Homo sapiens
cugugucucaggugug

SEQ ID NO: 50120 - RNA, 22 nt, Homo sapiens
cugugucucaggugugcccuga

SEQ ID NO: 50121 - RNA, 14 nt, Homo sapiens
cuguuaaaagauga

SEQ ID NO: 50122 - RNA, 16 nt, Homo sapiens
cuguuaaaagaugaaa

SEQ ID NO: 50123 - RNA, 17 nt, Homo sapiens
cuguuccucgccacgcu

SEQ ID NO: 50124 - RNA, 22 nt, Homo sapiens
cuguuccucgccacgcucuggg

SEQ ID NO: 50125 - RNA, 14 nt, Homo sapiens
cuguuccuucacau

SEQ ID NO: 50126 - RNA, 13 nt, Homo sapiens
cuguucgcgcgcc

SEQ ID NO: 50127 - RNA, 15 nt, Homo sapiens
cuguucgcgcgccuc

SEQ ID NO: 50128 - RNA, 12 nt, Homo sapiens
cuguucuuucug

SEQ ID NO: 50129 - RNA, 16 nt, Homo sapiens
cuguugccaaggcugg

SEQ ID NO: 50130 - RNA, 18 nt, Homo sapiens
cuguugccaaggcuggag

SEQ ID NO: 50131 - RNA, 21 nt, Homo sapiens
cuguugccaaggcuggagugc

SEQ ID NO: 50132 - RNA, 19 nt, Homo sapiens
cuguuuccauagggugaca

SEQ ID NO: 50133 - RNA, 17 nt, Homo sapiens
cuuaaaaucuaauucaa

SEQ ID NO: 50134 - RNA, 14 nt, Homo sapiens
cuuaaacacuaaaa

SEQ ID NO: 50135 - RNA, 16 nt, Homo sapiens
cuuaaagaauuuucaa

SEQ ID NO: 50136 - RNA, 23 nt, Homo sapiens
cuuaaaggaagguucugguguga

SEQ ID NO: 50137 - RNA, 15 nt, Homo sapiens
cuuaacucauugcaa

SEQ ID NO: 50138 - RNA, 12 nt, Homo sapiens
cuuaagcuuuca

SEQ ID NO: 50139 - RNA, 21 nt, Homo sapiens
cuuaauuauugauguuuucau

SEQ ID NO: 50140 - RNA, 22 nt, Homo sapiens
cuuaauuauugauguuuucaua

SEQ ID NO: 50141 - RNA, 15 nt, Homo sapiens
cuuacaaugcauucu

SEQ ID NO: 50142 - RNA, 13 nt, Homo sapiens
cuuacguccuucc

SEQ ID NO: 50143 - RNA, 21 nt, Homo sapiens
cuuacguccuuccacuuccaa

SEQ ID NO: 50144 - RNA, 19 nt, Homo sapiens
cuuacuaguuucccuugca

SEQ ID NO: 50145 - RNA, 12 nt, Homo sapiens
cuuacucuugau

SEQ ID NO: 50146 - RNA, 18 nt, Homo sapiens
cuuacucuugauuguggg

SEQ ID NO: 50147 - RNA, 21 nt, Homo sapiens
cuuacucuugauugugggaua

SEQ ID NO: 50148 - RNA, 15 nt, Homo sapiens
cuuacuuaguguuau

SEQ ID NO: 50149 - RNA, 12 nt, Homo sapiens
cuuagaacaaag

SEQ ID NO: 50150 - RNA, 20 nt, Homo sapiens
cuuagacccucaugcugcca

SEQ ID NO: 50151 - RNA, 18 nt, Homo sapiens
cuuagggaaggauacaaa

SEQ ID NO: 50152 - RNA, 21 nt, Homo sapiens
cuuaguguacaugaaagcgua

SEQ ID NO: 50153 - RNA, 13 nt, Homo sapiens
cuuauaauagguu

SEQ ID NO: 50154 - RNA, 15 nt, Homo sapiens
cuuaugaaacuaaga

SEQ ID NO: 50155 - RNA, 13 nt, Homo sapiens
cuuaugaaccuuu

SEQ ID NO: 50156 - RNA, 19 nt, Homo sapiens
cuuauuaaaacucauuuuu

SEQ ID NO: 50157 - RNA, 14 nt, Homo sapiens
cuuauuguaccucu

SEQ ID NO: 50158 - RNA, 20 nt, Homo sapiens
cuuauuguagcauccuggaa

SEQ ID NO: 50159 - RNA, 13 nt, Homo sapiens
cuuauuucauuuc

SEQ ID NO: 50160 - RNA, 14 nt, Homo sapiens
cuucacaacagauu

SEQ ID NO: 50161 - RNA, 20 nt, Homo sapiens
cuucagaucucuaacuucac

SEQ ID NO: 50162 - RNA, 15 nt, Homo sapiens
cuucagcgguuuaua

SEQ ID NO: 50163 - RNA, 18 nt, Homo sapiens
cuucagcgguuuauauaa

SEQ ID NO: 50164 - RNA, 16 nt, Homo sapiens
cuucaugcauuugcac

SEQ ID NO: 50165 - RNA, 15 nt, Homo sapiens
cuucauguacaucca

SEQ ID NO: 50166 - RNA, 19 nt, Homo sapiens
cuuccaaacagaacuaugg

SEQ ID NO: 50167 - RNA, 21 nt, Homo sapiens
cuuccagauccuggaaaucag

SEQ ID NO: 50168 - RNA, 15 nt, Homo sapiens
cuuccagggcuacgc

SEQ ID NO: 50169 - RNA, 17 nt, Homo sapiens
cuuccagggcuacgcgc

SEQ ID NO: 50170 - RNA, 19 nt, Homo sapiens
cuuccagggcuacgcgcgc

SEQ ID NO: 50171 - RNA, 20 nt, Homo sapiens
cuuccagggcuacgcgcgcu

SEQ ID NO: 50172 - RNA, 21 nt, Homo sapiens
cuuccagggcuacgcgcgcuc

SEQ ID NO: 50173 - RNA, 22 nt, Homo sapiens
cuuccagggcuacgcgcgcucc

SEQ ID NO: 50174 - RNA, 24 nt, Homo sapiens
cuuccagggcuacgcgcgcuccgc

SEQ ID NO: 50175 - RNA, 20 nt, Homo sapiens
cuucccagcuagaauucacu

SEQ ID NO: 50176 - RNA, 12 nt, Homo sapiens
cuucccgcuguu

SEQ ID NO: 50177 - RNA, 14 nt, Homo sapiens
cuucccgcuguucc

SEQ ID NO: 50178 - RNA, 15 nt, Homo sapiens
cuucccgcuguuccu

SEQ ID NO: 50179 - RNA, 23 nt, Homo sapiens
cuucccuuuuacauacugcuguc

SEQ ID NO: 50180 - RNA, 15 nt, Homo sapiens
cuuccgcauccuagu

SEQ ID NO: 50181 - RNA, 17 nt, Homo sapiens
cuuccgcauccuagucu

SEQ ID NO: 50182 - RNA, 16 nt, Homo sapiens
cuuccuauaauuuuag

SEQ ID NO: 50183 - RNA, 16 nt, Homo sapiens
cuuccucagcuguaga

SEQ ID NO: 50184 - RNA, 14 nt, Homo sapiens
cuuccucccggccg

SEQ ID NO: 50185 - RNA, 15 nt, Homo sapiens
cuuccucccggccgc

SEQ ID NO: 50186 - RNA, 16 nt, Homo sapiens
cuuccucccggccgcg

SEQ ID NO: 50187 - RNA, 17 nt, Homo sapiens
cuuccucccggccgcgc

SEQ ID NO: 50188 - RNA, 18 nt, Homo sapiens
cuuccucccggccgcgcu

SEQ ID NO: 50189 - RNA, 19 nt, Homo sapiens
cuuccucccggccgcgcug

SEQ ID NO: 50190 - RNA, 18 nt, Homo sapiens
cuuccuggcaauagucaa

SEQ ID NO: 50191 - RNA, 21 nt, Homo sapiens
cuucuaaguaaaaccacagca

SEQ ID NO: 50192 - RNA, 17 nt, Homo sapiens
cuucucauacuauuuaa

SEQ ID NO: 50193 - RNA, 20 nt, Homo sapiens
cuucucaucugugauucccu

SEQ ID NO: 50194 - RNA, 17 nt, Homo sapiens
cuucucuucacagucac

SEQ ID NO: 50195 - RNA, 21 nt, Homo sapiens
cuucugacacuaaaacaccuc

SEQ ID NO: 50196 - RNA, 13 nt, Homo sapiens
cuucuguuuuaua

SEQ ID NO: 50197 - RNA, 20 nt, Homo sapiens
cuucuguuuuauaauuuugu

SEQ ID NO: 50198 - RNA, 16 nt, Homo sapiens
cuucuuacaaugcauu

SEQ ID NO: 50199 - RNA, 15 nt, Homo sapiens
cuucuuggucucagu

SEQ ID NO: 50200 - RNA, 19 nt, Homo sapiens
cuucuuggucucaguguca

SEQ ID NO: 50201 - RNA, 16 nt, Homo sapiens
cuucuugguucugaaa

SEQ ID NO: 50202 - RNA, 16 nt, Homo sapiens
cuucuuucaugaaggg

SEQ ID NO: 50203 - RNA, 20 nt, Homo sapiens
cuucuuucaugaaggggcgg

SEQ ID NO: 50204 - RNA, 21 nt, Homo sapiens
cuugaaauagugucugaugaa

SEQ ID NO: 50205 - RNA, 15 nt, Homo sapiens
cuugaacccgggagg

SEQ ID NO: 50206 - RNA, 13 nt, Homo sapiens
cuugaauuguagg

SEQ ID NO: 50207 - RNA, 21 nt, Homo sapiens
cuugagaaaccuuauuguacc

SEQ ID NO: 50208 - RNA, 13 nt, Homo sapiens
cuugaugaagaag

SEQ ID NO: 50209 - RNA, 14 nt, Homo sapiens
cuugaugaagaagu

SEQ ID NO: 50210 - RNA, 20 nt, Homo sapiens
cuugaugauacaaugaacac

SEQ ID NO: 50211 - RNA, 23 nt, Homo sapiens
cuugccauggagguuaagcacuu

SEQ ID NO: 50212 - RNA, 15 nt, Homo sapiens
cuuggacucauuuua

SEQ ID NO: 50213 - RNA, 15 nt, Homo sapiens
cuuggauucaauuuu

SEQ ID NO: 50214 - RNA, 12 nt, Homo sapiens
cuuggcccagga

SEQ ID NO: 50215 - RNA, 19 nt, Homo sapiens
cuuggcccaggaguuuggc

SEQ ID NO: 50216 - RNA, 22 nt, Homo sapiens
cuugggacaaaaacaaacaaac

SEQ ID NO: 50217 - RNA, 15 nt, Homo sapiens
cuugggcaggucaca

SEQ ID NO: 50218 - RNA, 15 nt, Homo sapiens
cuugggcgggacaca

SEQ ID NO: 50219 - RNA, 14 nt, Homo sapiens
cuuggucucagugu

SEQ ID NO: 50220 - RNA, 19 nt, Homo sapiens
cuuguaaggcauacugccu

SEQ ID NO: 50221 - RNA, 21 nt, Homo sapiens
cuuguacauaaugcgugcaua

SEQ ID NO: 50222 - RNA, 13 nt, Homo sapiens
cuuguacucuaca

SEQ ID NO: 50223 - RNA, 20 nt, Homo sapiens
cuuguagcucucugaccucc

SEQ ID NO: 50224 - RNA, 18 nt, Homo sapiens
cuugucaauaaaauccau

SEQ ID NO: 50225 - RNA, 13 nt, Homo sapiens
cuugucucugggc

SEQ ID NO: 50226 - RNA, 17 nt, Homo sapiens
cuugugugcacauaucc

SEQ ID NO: 50227 - RNA, 20 nt, Homo sapiens
cuuguugagauccccguguu

SEQ ID NO: 50228 - RNA, 21 nt, Homo sapiens
cuuguuggauuuuugucuugu

SEQ ID NO: 50229 - RNA, 21 nt, Homo sapiens
cuuguuuuuccacuacugcua

SEQ ID NO: 50230 - RNA, 24 nt, Homo sapiens
cuuuaaaaaaaaaaaaaaagccaa

SEQ ID NO: 50231 - RNA, 15 nt, Homo sapiens
cuuuaaaacuuaucc

SEQ ID NO: 50232 - RNA, 20 nt, Homo sapiens
cuuuaaguguaacuggcagu

SEQ ID NO: 50233 - RNA, 22 nt, Homo sapiens
cuuuaauuucaugaaaagauua

SEQ ID NO: 50234 - RNA, 22 nt, Homo sapiens
cuuuaccuuuuuuauacauaaa

SEQ ID NO: 50235 - RNA, 15 nt, Homo sapiens
cuuuagggaccugcu

SEQ ID NO: 50236 - RNA, 16 nt, Homo sapiens
cuuuagggaccugcug

SEQ ID NO: 50237 - RNA, 22 nt, Homo sapiens
cuuuaguuuuugugaaguuuaa

SEQ ID NO: 50238 - RNA, 11 nt, Homo sapiens
cuuuaucucag

SEQ ID NO: 50239 - RNA, 20 nt, Homo sapiens
cuuucaagggaccucuccau

SEQ ID NO: 50240 - RNA, 23 nt, Homo sapiens
cuuucaagggaccucuccaugau

SEQ ID NO: 50241 - RNA, 17 nt, Homo sapiens
cuuucacaggggacagg

SEQ ID NO: 50242 - RNA, 15 nt, Homo sapiens
cuuucauauuuuagc

SEQ ID NO: 50243 - RNA, 19 nt, Homo sapiens
cuuucaugaaggggcggcg

SEQ ID NO: 50244 - RNA, 22 nt, Homo sapiens
cuuucaugaaggggcggcggcc

SEQ ID NO: 50245 - RNA, 15 nt, Homo sapiens
cuuuccagagaccag

SEQ ID NO: 50246 - RNA, 20 nt, Homo sapiens
cuuuccagagaccaguauuc

SEQ ID NO: 50247 - RNA, 23 nt, Homo sapiens
cuuucucuaguucaaguucacca

SEQ ID NO: 50248 - RNA, 20 nt, Homo sapiens
cuuugaugauuaauucaccu

SEQ ID NO: 50249 - RNA, 21 nt, Homo sapiens
cuuugaugauuaauucaccuu

SEQ ID NO: 50250 - RNA, 18 nt, Homo sapiens
cuuugauuuuauaugcua

SEQ ID NO: 50251 - RNA, 19 nt, Homo sapiens
cuuugugcagauucuuuac

SEQ ID NO: 50252 - RNA, 18 nt, Homo sapiens
cuuuuaaaaaaaaauacu

SEQ ID NO: 50253 - RNA, 15 nt, Homo sapiens
cuuuuaaacuuugau

SEQ ID NO: 50254 - RNA, 16 nt, Homo sapiens
cuuuuacauacugcug

SEQ ID NO: 50255 - RNA, 20 nt, Homo sapiens
cuuuuauaaacuuuaccuuu

SEQ ID NO: 50256 - RNA, 15 nt, Homo sapiens
cuuuuauugccauga

SEQ ID NO: 50257 - RNA, 19 nt, Homo sapiens
cuuuucaaaauuggacuua

SEQ ID NO: 50258 - RNA, 20 nt, Homo sapiens
cuuuugauaaucaacugggc

SEQ ID NO: 50259 - RNA, 22 nt, Homo sapiens
cuuuuggcuuguaaaguacaga

SEQ ID NO: 50260 - RNA, 22 nt, Homo sapiens
cuuuuuagagaaauuugccaau

SEQ ID NO: 50261 - RNA, 19 nt, Homo sapiens
cuuuuuccagguuccugag

SEQ ID NO: 50262 - RNA, 19 nt, Homo sapiens
cuuuuuuagaguugauacu

SEQ ID NO: 50263 - RNA, 18 nt, Homo sapiens
cuuuuuuuuaaguuacac

SEQ ID NO: 50264 - RNA, 19 nt, Homo sapiens
gaaaaaguucugcagauaa

SEQ ID NO: 50265 - RNA, 13 nt, Homo sapiens
gaaaacaaggaug

SEQ ID NO: 50266 - RNA, 18 nt, Homo sapiens
gaaaacacauuuuucuua

SEQ ID NO: 50267 - RNA, 13 nt, Homo sapiens
gaaaacaggcaaa

SEQ ID NO: 50268 - RNA, 20 nt, Homo sapiens
gaaaacauagcaucucagga

SEQ ID NO: 50269 - RNA, 21 nt, Homo sapiens
gaaaacaugcuacacacugca

SEQ ID NO: 50270 - RNA, 20 nt, Homo sapiens
gaaaagacauaagcaaagac

SEQ ID NO: 50271 - RNA, 20 nt, Homo sapiens
gaaaaguuucccagucuuca

SEQ ID NO: 50272 - RNA, 17 nt, Homo sapiens
gaaaauaaaagcacuua

SEQ ID NO: 50273 - RNA, 16 nt, Homo sapiens
gaaaauaaaauauuua

SEQ ID NO: 50274 - RNA, 18 nt, Homo sapiens
gaaaauaaaauauuuaaa

SEQ ID NO: 50275 - RNA, 20 nt, Homo sapiens
gaaaaucuacacuccaguga

SEQ ID NO: 50276 - RNA, 12 nt, Homo sapiens
gaaaaugugcaa

SEQ ID NO: 50277 - RNA, 15 nt, Homo sapiens
gaaaaugugcaauau

SEQ ID NO: 50278 - RNA, 19 nt, Homo sapiens
gaaacaagucagucauuca

SEQ ID NO: 50279 - RNA, 20 nt, Homo sapiens
gaaaccuuauuguaccucuc

SEQ ID NO: 50280 - RNA, 23 nt, Homo sapiens
gaaacguauucaaacaauuugaa

SEQ ID NO: 50281 - RNA, 19 nt, Homo sapiens
gaaacuccacauccugugg

SEQ ID NO: 50282 - RNA, 22 nt, Homo sapiens
gaaagaaaaucaggcuggccaa

SEQ ID NO: 50283 - RNA, 17 nt, Homo sapiens
gaaagaagagccggagc

SEQ ID NO: 50284 - RNA, 13 nt, Homo sapiens
gaaagaagcccaa

SEQ ID NO: 50285 - RNA, 15 nt, Homo sapiens
gaaagagaacuucca

SEQ ID NO: 50286 - RNA, 14 nt, Homo sapiens
gaaagaggaaugaa

SEQ ID NO: 50287 - RNA, 13 nt, Homo sapiens
gaaagauucaaug

SEQ ID NO: 50288 - RNA, 17 nt, Homo sapiens
gaaagcagggacuugaa

SEQ ID NO: 50289 - RNA, 18 nt, Homo sapiens
gaaagcagggacuugaac

SEQ ID NO: 50290 - RNA, 16 nt, Homo sapiens
gaaagcugaguguuuc

SEQ ID NO: 50291 - RNA, 20 nt, Homo sapiens
gaaaggagaaguuaagcaac

SEQ ID NO: 50292 - RNA, 16 nt, Homo sapiens
gaaaggcauucucuga

SEQ ID NO: 50293 - RNA, 23 nt, Homo sapiens
gaaagggcuguuauaaucuuuca

SEQ ID NO: 50294 - RNA, 14 nt, Homo sapiens
gaaagggucucccu

SEQ ID NO: 50295 - RNA, 16 nt, Homo sapiens
gaaagggucucccucu

SEQ ID NO: 50296 - RNA, 22 nt, Homo sapiens
gaaagggucucccucuguugcc

SEQ ID NO: 50297 - RNA, 14 nt, Homo sapiens
gaaagguacuucaa

SEQ ID NO: 50298 - RNA, 15 nt, Homo sapiens
gaaagucccagauca

SEQ ID NO: 50299 - RNA, 17 nt, Homo sapiens
gaaagugacaagcucac

SEQ ID NO: 50300 - RNA, 14 nt, Homo sapiens
gaaaguuuuggaaa

SEQ ID NO: 50301 - RNA, 13 nt, Homo sapiens
gaaauaagccaga

SEQ ID NO: 50302 - RNA, 17 nt, Homo sapiens
gaaauaagccagacauc

SEQ ID NO: 50303 - RNA, 19 nt, Homo sapiens
gaaauaggaaauauuuuaa

SEQ ID NO: 50304 - RNA, 13 nt, Homo sapiens
gaaauagugucug

SEQ ID NO: 50305 - RNA, 14 nt, Homo sapiens
gaaauagugucuga

SEQ ID NO: 50306 - RNA, 16 nt, Homo sapiens
gaaauauuauguuaaa

SEQ ID NO: 50307 - RNA, 11 nt, Homo sapiens
gaaauauuccu

SEQ ID NO: 50308 - RNA, 16 nt, Homo sapiens
gaaauauuuauuuuaa

SEQ ID NO: 50309 - RNA, 20 nt, Homo sapiens
gaaauauuuauuuuaauaau

SEQ ID NO: 50310 - RNA, 21 nt, Homo sapiens
gaaaucaaauaugcaaagcac

SEQ ID NO: 50311 - RNA, 19 nt, Homo sapiens
gaaaugacuaaaaaacaaa

SEQ ID NO: 50312 - RNA, 14 nt, Homo sapiens
gaaaugauuucaca

SEQ ID NO: 50313 - RNA, 23 nt, Homo sapiens
gaaaugcugguuuuucaguuuuc

SEQ ID NO: 50314 - RNA, 13 nt, Homo sapiens
gaaauuaaccaua

SEQ ID NO: 50315 - RNA, 14 nt, Homo sapiens
gaaauuaaguaucu

SEQ ID NO: 50316 - RNA, 20 nt, Homo sapiens
gaaauuuaauucauguuucu

SEQ ID NO: 50317 - RNA, 18 nt, Homo sapiens
gaacaaauuuacagagac

SEQ ID NO: 50318 - RNA, 13 nt, Homo sapiens
gaacagaagagga

SEQ ID NO: 50319 - RNA, 17 nt, Homo sapiens
gaacaggauauucucac

SEQ ID NO: 50320 - RNA, 18 nt, Homo sapiens
gaacagugauuaccaggg

SEQ ID NO: 50321 - RNA, 18 nt, Homo sapiens
gaacaguuaccucugccu

SEQ ID NO: 50322 - RNA, 14 nt, Homo sapiens
gaacaugagccuuu

SEQ ID NO: 50323 - RNA, 21 nt, Homo sapiens
gaacaugagccuuuguugcua

SEQ ID NO: 50324 - RNA, 23 nt, Homo sapiens
gaacccauauuuguacaccaaua

SEQ ID NO: 50325 - RNA, 19 nt, Homo sapiens
gaaccguuugugauugcca

SEQ ID NO: 50326 - RNA, 17 nt, Homo sapiens
gaacgguaaauuucugu

SEQ ID NO: 50327 - RNA, 19 nt, Homo sapiens
gaacguuuuuccuguucuu

SEQ ID NO: 50328 - RNA, 20 nt, Homo sapiens
gaacguuuuuccuguucuua

SEQ ID NO: 50329 - RNA, 23 nt, Homo sapiens
gaacucaaauacgugggcauuca

SEQ ID NO: 50330 - RNA, 24 nt, Homo sapiens
gaacucaaauacgugggcauucaa

SEQ ID NO: 50331 - RNA, 13 nt, Homo sapiens
gaacucucgagcg

SEQ ID NO: 50332 - RNA, 14 nt, Homo sapiens
gaacugaaaucaua

SEQ ID NO: 50333 - RNA, 16 nt, Homo sapiens
gaacugaacauuccag

SEQ ID NO: 50334 - RNA, 11 nt, Homo sapiens
gaacugcugga

SEQ ID NO: 50335 - RNA, 14 nt, Homo sapiens
gaacugcuggauuc

SEQ ID NO: 50336 - RNA, 21 nt, Homo sapiens
gaacugcuggauucaagugau

SEQ ID NO: 50337 - RNA, 19 nt, Homo sapiens
gaacuuguugagauccccg

SEQ ID NO: 50338 - RNA, 17 nt, Homo sapiens
gaacuuuuuguuuuguu

SEQ ID NO: 50339 - RNA, 19 nt, Homo sapiens
gaagaaauuccaggaaaau

SEQ ID NO: 50340 - RNA, 11 nt, Homo sapiens
gaagaacugaa

SEQ ID NO: 50341 - RNA, 12 nt, Homo sapiens
gaagaacugaaa

SEQ ID NO: 50342 - RNA, 16 nt, Homo sapiens
gaagaagcaccaauca

SEQ ID NO: 50343 - RNA, 12 nt, Homo sapiens
gaagaaugacua

SEQ ID NO: 50344 - RNA, 20 nt, Homo sapiens
gaagacaaugacuuacugua

SEQ ID NO: 50345 - RNA, 20 nt, Homo sapiens
gaagagaauauuagcuuuac

SEQ ID NO: 50346 - RNA, 12 nt, Homo sapiens
gaagagccggag

SEQ ID NO: 50347 - RNA, 14 nt, Homo sapiens
gaagagccggagcc

SEQ ID NO: 50348 - RNA, 18 nt, Homo sapiens
gaagagccggagccucca

SEQ ID NO: 50349 - RNA, 19 nt, Homo sapiens
gaagagccggagccuccag

SEQ ID NO: 50350 - RNA, 21 nt, Homo sapiens
gaagagccggagccuccagcu

SEQ ID NO: 50351 - RNA, 22 nt, Homo sapiens
gaagagccggagccuccagcug

SEQ ID NO: 50352 - RNA, 20 nt, Homo sapiens
gaagaguggguuucacaagu

SEQ ID NO: 50353 - RNA, 21 nt, Homo sapiens
gaagaguggguuucacaagug

SEQ ID NO: 50354 - RNA, 17 nt, Homo sapiens
gaagauucuauguuaau

SEQ ID NO: 50355 - RNA, 14 nt, Homo sapiens
gaagcaacccaaau

SEQ ID NO: 50356 - RNA, 19 nt, Homo sapiens
gaagcaacccaaauguuca

SEQ ID NO: 50357 - RNA, 16 nt, Homo sapiens
gaagcaccaaucauga

SEQ ID NO: 50358 - RNA, 22 nt, Homo sapiens
gaagcauuuuauaaaucgcuuu

SEQ ID NO: 50359 - RNA, 15 nt, Homo sapiens
gaagcuuccauucca

SEQ ID NO: 50360 - RNA, 22 nt, Homo sapiens
gaagcuuccauuccaagccuga

SEQ ID NO: 50361 - RNA, 16 nt, Homo sapiens
gaaggcaaaugacuuu

SEQ ID NO: 50362 - RNA, 21 nt, Homo sapiens
gaaggcuguggauuuaaugug

SEQ ID NO: 50363 - RNA, 12 nt, Homo sapiens
gaaggggcggcg

SEQ ID NO: 50364 - RNA, 13 nt, Homo sapiens
gaaggggcggcgg

SEQ ID NO: 50365 - RNA, 14 nt, Homo sapiens
gaaggggcggcggc

SEQ ID NO: 50366 - RNA, 16 nt, Homo sapiens
gaaggggcggcggccc

SEQ ID NO: 50367 - RNA, 19 nt, Homo sapiens
gaaguacucauacauguua

SEQ ID NO: 50368 - RNA, 21 nt, Homo sapiens
gaaguauccuucagccugaaa

SEQ ID NO: 50369 - RNA, 20 nt, Homo sapiens
gaagucaaggcuuagacccu

SEQ ID NO: 50370 - RNA, 23 nt, Homo sapiens
gaagucaaggcuuagacccucau

SEQ ID NO: 50371 - RNA, 12 nt, Homo sapiens
gaagucuuccau

SEQ ID NO: 50372 - RNA, 16 nt, Homo sapiens
gaagucuuccauagag

SEQ ID NO: 50373 - RNA, 13 nt, Homo sapiens
gaagugaaacugc

SEQ ID NO: 50374 - RNA, 18 nt, Homo sapiens
gaaguuaagcaacaucua

SEQ ID NO: 50375 - RNA, 20 nt, Homo sapiens
gaaguugcagugagcugaua

SEQ ID NO: 50376 - RNA, 15 nt, Homo sapiens
gaauacauaaaguau

SEQ ID NO: 50377 - RNA, 23 nt, Homo sapiens
gaauacuaauaaaauacauacua

SEQ ID NO: 50378 - RNA, 23 nt, Homo sapiens
gaauaguguuggaaaaugugcaa

SEQ ID NO: 50379 - RNA, 14 nt, Homo sapiens
gaauauauaaccag

SEQ ID NO: 50380 - RNA, 16 nt, Homo sapiens
gaauauauuuccuuau

SEQ ID NO: 50381 - RNA, 19 nt, Homo sapiens
gaauaucuauuaauauaug

SEQ ID NO: 50382 - RNA, 17 nt, Homo sapiens
gaauauguaaauagaaa

SEQ ID NO: 50383 - RNA, 18 nt, Homo sapiens
gaauauuuauuaccucug

SEQ ID NO: 50384 - RNA, 21 nt, Homo sapiens
gaauauuuauuaccucugaua

SEQ ID NO: 50385 - RNA, 20 nt, Homo sapiens
gaaucacucauuuauuucca

SEQ ID NO: 50386 - RNA, 16 nt, Homo sapiens
gaaucacuugaacccg

SEQ ID NO: 50387 - RNA, 17 nt, Homo sapiens
gaaucagaucauuucaa

SEQ ID NO: 50388 - RNA, 15 nt, Homo sapiens
gaaucauaugggaua

SEQ ID NO: 50389 - RNA, 13 nt, Homo sapiens
gaaucuuuauagu

SEQ ID NO: 50390 - RNA, 14 nt, Homo sapiens
gaaucuuuauaguu

SEQ ID NO: 50391 - RNA, 11 nt, Homo sapiens
gaaugaaugaa

SEQ ID NO: 50392 - RNA, 23 nt, Homo sapiens
gaaugauuaugaauuacauuugu

SEQ ID NO: 50393 - RNA, 17 nt, Homo sapiens
gaaugucaguuguuauu

SEQ ID NO: 50394 - RNA, 13 nt, Homo sapiens
gaauguuuucaaa

SEQ ID NO: 50395 - RNA, 20 nt, Homo sapiens
gaauguuuucaaauguucuc

SEQ ID NO: 50396 - RNA, 15 nt, Homo sapiens
gaauuaguuuuauau

SEQ ID NO: 50397 - RNA, 22 nt, Homo sapiens
gaauugaauucccugccuggau

SEQ ID NO: 50398 - RNA, 12 nt, Homo sapiens
gaauuggagcuc

SEQ ID NO: 50399 - RNA, 14 nt, Homo sapiens
gaauuggagcucgu

SEQ ID NO: 50400 - RNA, 17 nt, Homo sapiens
gaauuggagcucguggg

SEQ ID NO: 50401 - RNA, 19 nt, Homo sapiens
gaauuguaggugacuauua

SEQ ID NO: 50402 - RNA, 17 nt, Homo sapiens
gaauuuauucaauuccu

SEQ ID NO: 50403 - RNA, 20 nt, Homo sapiens
gaauuuuucucuaacucaga

SEQ ID NO: 50404 - RNA, 15 nt, Homo sapiens
gacaaagacaaauuc

SEQ ID NO: 50405 - RNA, 21 nt, Homo sapiens
gacaaaugacccccaucccau

SEQ ID NO: 50406 - RNA, 13 nt, Homo sapiens
gacaaauucuguu

SEQ ID NO: 50407 - RNA, 13 nt, Homo sapiens
gacaacugugacu

SEQ ID NO: 50408 - RNA, 16 nt, Homo sapiens
gacaacugugacugua

SEQ ID NO: 50409 - RNA, 13 nt, Homo sapiens
gacaagcucacag

SEQ ID NO: 50410 - RNA, 13 nt, Homo sapiens
gacacacaugaag

SEQ ID NO: 50411 - RNA, 13 nt, Homo sapiens
gacacacugaaga

SEQ ID NO: 50412 - RNA, 19 nt, Homo sapiens
gacacagcugcagaggcca

SEQ ID NO: 50413 - RNA, 21 nt, Homo sapiens
gacacaggcuccaaacuggag

SEQ ID NO: 50414 - RNA, 16 nt, Homo sapiens
gacacaugcaagguca

SEQ ID NO: 50415 - RNA, 16 nt, Homo sapiens
gacacaugggugcuau

SEQ ID NO: 50416 - RNA, 11 nt, Homo sapiens
gacaccaccac

SEQ ID NO: 50417 - RNA, 12 nt, Homo sapiens
gacaccaccacc

SEQ ID NO: 50418 - RNA, 13 nt, Homo sapiens
gacaccaccaccc

SEQ ID NO: 50419 - RNA, 17 nt, Homo sapiens
gacaccaccacccuugc

SEQ ID NO: 50420 - RNA, 19 nt, Homo sapiens
gacagaaagcagaacagug

SEQ ID NO: 50421 - RNA, 21 nt, Homo sapiens
gacagaaagcagaacagugau

SEQ ID NO: 50422 - RNA, 20 nt, Homo sapiens
gacagcccuucuuuccacag

SEQ ID NO: 50423 - RNA, 19 nt, Homo sapiens
gacagucaccucauggaau

SEQ ID NO: 50424 - RNA, 14 nt, Homo sapiens
gacagugagacucu

SEQ ID NO: 50425 - RNA, 20 nt, Homo sapiens
gacaguuccugagaccagcc

SEQ ID NO: 50426 - RNA, 15 nt, Homo sapiens
gacauacuaaccagc

SEQ ID NO: 50427 - RNA, 20 nt, Homo sapiens
gacauacuaaccagcagaaa

SEQ ID NO: 50428 - RNA, 20 nt, Homo sapiens
gacauagaauuaacacauga

SEQ ID NO: 50429 - RNA, 15 nt, Homo sapiens
gacaucaacagauaa

SEQ ID NO: 50430 - RNA, 15 nt, Homo sapiens
gacaugggccccaga

SEQ ID NO: 50431 - RNA, 17 nt, Homo sapiens
gacaugggccccagaua

SEQ ID NO: 50432 - RNA, 18 nt, Homo sapiens
gacaugggccccagauac

SEQ ID NO: 50433 - RNA, 18 nt, Homo sapiens
gacauguuuacaaaccuc

SEQ ID NO: 50434 - RNA, 20 nt, Homo sapiens
gacauguuuacaaaccucaa

SEQ ID NO: 50435 - RNA, 22 nt, Homo sapiens
gacauguuuacaaaccucaagc

SEQ ID NO: 50436 - RNA, 23 nt, Homo sapiens
gacauguuuacaaaccucaagcc

SEQ ID NO: 50437 - RNA, 18 nt, Homo sapiens
gacauuuuaugucuuucu

SEQ ID NO: 50438 - RNA, 14 nt, Homo sapiens
gaccaaggcccccg

SEQ ID NO: 50439 - RNA, 15 nt, Homo sapiens
gaccaaggcccccgg

SEQ ID NO: 50440 - RNA, 20 nt, Homo sapiens
gaccaaggcccccgggccga

SEQ ID NO: 50441 - RNA, 22 nt, Homo sapiens
gaccaaggcccccgggccgacg

SEQ ID NO: 50442 - RNA, 23 nt, Homo sapiens
gaccaaggcccccgggccgacgg

SEQ ID NO: 50443 - RNA, 21 nt, Homo sapiens
gaccaauauuguacaguuuuu

SEQ ID NO: 50444 - RNA, 19 nt, Homo sapiens
gaccagccaaccugggggc

SEQ ID NO: 50445 - RNA, 18 nt, Homo sapiens
gaccaggcacccccagaa

SEQ ID NO: 50446 - RNA, 21 nt, Homo sapiens
gaccauaaccccggaagccaa

SEQ ID NO: 50447 - RNA, 12 nt, Homo sapiens
gaccaucccggc

SEQ ID NO: 50448 - RNA, 14 nt, Homo sapiens
gaccaucccggccg

SEQ ID NO: 50449 - RNA, 15 nt, Homo sapiens
gaccaucccggccgg

SEQ ID NO: 50450 - RNA, 16 nt, Homo sapiens
gaccaucccggccggc

SEQ ID NO: 50451 - RNA, 17 nt, Homo sapiens
gaccaucccggccggcg

SEQ ID NO: 50452 - RNA, 18 nt, Homo sapiens
gaccaucccggccggcgc

SEQ ID NO: 50453 - RNA, 20 nt, Homo sapiens
gaccaucccggccggcgcgc

SEQ ID NO: 50454 - RNA, 23 nt, Homo sapiens
gaccaucccggccggcgcgcuca

SEQ ID NO: 50455 - RNA, 15 nt, Homo sapiens
gacccaaaaggcaga

SEQ ID NO: 50456 - RNA, 15 nt, Homo sapiens
gacccccaucccaug

SEQ ID NO: 50457 - RNA, 16 nt, Homo sapiens
gacccccaucccaugg

SEQ ID NO: 50458 - RNA, 16 nt, Homo sapiens
gacccucaugcugcca

SEQ ID NO: 50459 - RNA, 17 nt, Homo sapiens
gacccucaugcugccaa

SEQ ID NO: 50460 - RNA, 20 nt, Homo sapiens
gacccucaugcugccaauau

SEQ ID NO: 50461 - RNA, 16 nt, Homo sapiens
gaccucugcagcaaua

SEQ ID NO: 50462 - RNA, 18 nt, Homo sapiens
gaccucugcagcaauaaa

SEQ ID NO: 50463 - RNA, 15 nt, Homo sapiens
gaccugacagcccaa

SEQ ID NO: 50464 - RNA, 10 nt, Homo sapiens
gaccugcugu

SEQ ID NO: 50465 - RNA, 21 nt, Homo sapiens
gaccugcuucuauuagcccuu

SEQ ID NO: 50466 - RNA, 17 nt, Homo sapiens
gaccugggccauaguca

SEQ ID NO: 50467 - RNA, 22 nt, Homo sapiens
gaccuggucgucgucuugacuu

SEQ ID NO: 50468 - RNA, 19 nt, Homo sapiens
gaccuguggccaaguucuu

SEQ ID NO: 50469 - RNA, 15 nt, Homo sapiens
gaccuucccagcuag

SEQ ID NO: 50470 - RNA, 23 nt, Homo sapiens
gaccuucccagcuagaauucacu

SEQ ID NO: 50471 - RNA, 12 nt, Homo sapiens
gacgaaccuuga

SEQ ID NO: 50472 - RNA, 14 nt, Homo sapiens
gacgaaccuugaaa

SEQ ID NO: 50473 - RNA, 16 nt, Homo sapiens
gacgcugcugccgugg

SEQ ID NO: 50474 - RNA, 18 nt, Homo sapiens
gacggagccgggaaagaa

SEQ ID NO: 50475 - RNA, 13 nt, Homo sapiens
gacggcuccggac

SEQ ID NO: 50476 - RNA, 17 nt, Homo sapiens
gacggcuccggacgcug

SEQ ID NO: 50477 - RNA, 19 nt, Homo sapiens
gacggcuccggacgcugcu

SEQ ID NO: 50478 - RNA, 13 nt, Homo sapiens
gacgggguuugcc

SEQ ID NO: 50479 - RNA, 17 nt, Homo sapiens
gacgggguuugccaugc

SEQ ID NO: 50480 - RNA, 20 nt, Homo sapiens
gacgggguuugccaugcugg

SEQ ID NO: 50481 - RNA, 23 nt, Homo sapiens
gacgggguuugccaugcuggcca

SEQ ID NO: 50482 - RNA, 21 nt, Homo sapiens
gacgguuuaaugggcacaggg

SEQ ID NO: 50483 - RNA, 15 nt, Homo sapiens
gacgugacuggccug

SEQ ID NO: 50484 - RNA, 16 nt, Homo sapiens
gacgugacuggccugc

SEQ ID NO: 50485 - RNA, 19 nt, Homo sapiens
gacgugacuggccugcugg

SEQ ID NO: 50486 - RNA, 20 nt, Homo sapiens
gacgugacuggccugcugga

SEQ ID NO: 50487 - RNA, 17 nt, Homo sapiens
gacgugauuuugcugua

SEQ ID NO: 50488 - RNA, 20 nt, Homo sapiens
gacgugauuuugcuguagaa

SEQ ID NO: 50489 - RNA, 13 nt, Homo sapiens
gacuaaaaaacaa

SEQ ID NO: 50490 - RNA, 19 nt, Homo sapiens
gacuaugaggaauauuugc

SEQ ID NO: 50491 - RNA, 23 nt, Homo sapiens
gacuccaaagaaauguaagggaa

SEQ ID NO: 50492 - RNA, 16 nt, Homo sapiens
gacugucucacuuaau

SEQ ID NO: 50493 - RNA, 15 nt, Homo sapiens
gacuuacuguacaug

SEQ ID NO: 50494 - RNA, 15 nt, Homo sapiens
gacuucauuaauaau

SEQ ID NO: 50495 - RNA, 20 nt, Homo sapiens
gacuucugucuucacaacag

SEQ ID NO: 50496 - RNA, 12 nt, Homo sapiens
gacuugaaccca

SEQ ID NO: 50497 - RNA, 19 nt, Homo sapiens
gacuuggccccugccaccu

SEQ ID NO: 50498 - RNA, 14 nt, Homo sapiens
gagaaaagacauaa

SEQ ID NO: 50499 - RNA, 17 nt, Homo sapiens
gagaaaauaaaagcacu

SEQ ID NO: 50500 - RNA, 19 nt, Homo sapiens
gagaaaauaaaagcacuua

SEQ ID NO: 50501 - RNA, 22 nt, Homo sapiens
gagaaaccuuauuguaccucuc

SEQ ID NO: 50502 - RNA, 15 nt, Homo sapiens
gagaaagacuauuca

SEQ ID NO: 50503 - RNA, 12 nt, Homo sapiens
gagaagaaugac

SEQ ID NO: 50504 - RNA, 14 nt, Homo sapiens
gagaaguuaagcaa

SEQ ID NO: 50505 - RNA, 16 nt, Homo sapiens
gagaauaaaaaaugua

SEQ ID NO: 50506 - RNA, 22 nt, Homo sapiens
gagaaucagaucauuucaaaac

SEQ ID NO: 50507 - RNA, 18 nt, Homo sapiens
gagacacaugggugcuau

SEQ ID NO: 50508 - RNA, 10 nt, Homo sapiens
gagacaccac

SEQ ID NO: 50509 - RNA, 11 nt, Homo sapiens
gagacaccacc

SEQ ID NO: 50510 - RNA, 12 nt, Homo sapiens
gagacaccacca

SEQ ID NO: 50511 - RNA, 13 nt, Homo sapiens
gagacaccaccac

SEQ ID NO: 50512 - RNA, 14 nt, Homo sapiens
gagacaccaccacc

SEQ ID NO: 50513 - RNA, 21 nt, Homo sapiens
gagacaccaccacccuugcca

SEQ ID NO: 50514 - RNA, 22 nt, Homo sapiens
gagacagaaagcagaacaguga

SEQ ID NO: 50515 - RNA, 13 nt, Homo sapiens
gagacagcagguc

SEQ ID NO: 50516 - RNA, 14 nt, Homo sapiens
gagacagcucugca

SEQ ID NO: 50517 - RNA, 19 nt, Homo sapiens
gagacagggaaagggucuc

SEQ ID NO: 50518 - RNA, 16 nt, Homo sapiens
gagaccaaggcccccg

SEQ ID NO: 50519 - RNA, 22 nt, Homo sapiens
gagaccaaggcccccgggccga

SEQ ID NO: 50520 - RNA, 12 nt, Homo sapiens
gagaccagccaa

SEQ ID NO: 50521 - RNA, 22 nt, Homo sapiens
gagaccagccaaccugggggcu

SEQ ID NO: 50522 - RNA, 18 nt, Homo sapiens
gagacgggguuugccaug

SEQ ID NO: 50523 - RNA, 21 nt, Homo sapiens
gagacgggguuugccaugcug

SEQ ID NO: 50524 - RNA, 23 nt, Homo sapiens
gagacgggguuugccaugcuggc

SEQ ID NO: 50525 - RNA, 16 nt, Homo sapiens
gagacucugucucagu

SEQ ID NO: 50526 - RNA, 15 nt, Homo sapiens
gagagagcuuggaau

SEQ ID NO: 50527 - RNA, 23 nt, Homo sapiens
gagagucuauuuacggaacucaa

SEQ ID NO: 50528 - RNA, 17 nt, Homo sapiens
gagauggguuugacaag

SEQ ID NO: 50529 - RNA, 16 nt, Homo sapiens
gagauuucaugccugg

SEQ ID NO: 50530 - RNA, 11 nt, Homo sapiens
gagcaaaaguu

SEQ ID NO: 50531 - RNA, 22 nt, Homo sapiens
gagcaagacucugucucaaaaa

SEQ ID NO: 50532 - RNA, 20 nt, Homo sapiens
gagcaccugcaggcgugacc

SEQ ID NO: 50533 - RNA, 14 nt, Homo sapiens
gagcagauguaaua

SEQ ID NO: 50534 - RNA, 14 nt, Homo sapiens
gagcaggcuacugu

SEQ ID NO: 50535 - RNA, 17 nt, Homo sapiens
gagcaggcuacugucag

SEQ ID NO: 50536 - RNA, 20 nt, Homo sapiens
gagcaggcuacugucagcuc

SEQ ID NO: 50537 - RNA, 12 nt, Homo sapiens
gagcaguagcag

SEQ ID NO: 50538 - RNA, 14 nt, Homo sapiens
gagcaguagcagca

SEQ ID NO: 50539 - RNA, 23 nt, Homo sapiens
gagcaguagcagcagcaucucug

SEQ ID NO: 50540 - RNA, 19 nt, Homo sapiens
gagcauuuauaaauggaca

SEQ ID NO: 50541 - RNA, 18 nt, Homo sapiens
gagccaccaaacccggcc

SEQ ID NO: 50542 - RNA, 22 nt, Homo sapiens
gagccaccaaacccggccugau

SEQ ID NO: 50543 - RNA, 20 nt, Homo sapiens
gagccaggaaucacuggcug

SEQ ID NO: 50544 - RNA, 19 nt, Homo sapiens
gagccccuugggcagguca

SEQ ID NO: 50545 - RNA, 20 nt, Homo sapiens
gagccccuugggcaggucac

SEQ ID NO: 50546 - RNA, 13 nt, Homo sapiens
gagccggagccuc

SEQ ID NO: 50547 - RNA, 16 nt, Homo sapiens
gagccggagccuccag

SEQ ID NO: 50548 - RNA, 17 nt, Homo sapiens
gagccggagccuccagc

SEQ ID NO: 50549 - RNA, 18 nt, Homo sapiens
gagccggagccuccagcu

SEQ ID NO: 50550 - RNA, 20 nt, Homo sapiens
gagccggagccuccagcugc

SEQ ID NO: 50551 - RNA, 17 nt, Homo sapiens
gagccgggaaagaagag

SEQ ID NO: 50552 - RNA, 18 nt, Homo sapiens
gagccgggaaagaagagc

SEQ ID NO: 50553 - RNA, 19 nt, Homo sapiens
gagccuccagcugccccgg

SEQ ID NO: 50554 - RNA, 20 nt, Homo sapiens
gagccuccagcugccccggg

SEQ ID NO: 50555 - RNA, 14 nt, Homo sapiens
gagccuuuguugcu

SEQ ID NO: 50556 - RNA, 12 nt, Homo sapiens
gagcgacaguga

SEQ ID NO: 50557 - RNA, 13 nt, Homo sapiens
gagcgacagugag

SEQ ID NO: 50558 - RNA, 13 nt, Homo sapiens
gagcgagccccag

SEQ ID NO: 50559 - RNA, 14 nt, Homo sapiens
gagcgagccccagg

SEQ ID NO: 50560 - RNA, 15 nt, Homo sapiens
gagcgagccccaggc

SEQ ID NO: 50561 - RNA, 20 nt, Homo sapiens
gagcgagccccaggcggguc

SEQ ID NO: 50562 - RNA, 15 nt, Homo sapiens
gagcgcgcgcgcccu

SEQ ID NO: 50563 - RNA, 16 nt, Homo sapiens
gagcgcgcgcgcccuc

SEQ ID NO: 50564 - RNA, 18 nt, Homo sapiens
gagcgcgcgcgcccucug

SEQ ID NO: 50565 - RNA, 14 nt, Homo sapiens
gagcuacaggcccc

SEQ ID NO: 50566 - RNA, 19 nt, Homo sapiens
gagcuaggggggucagcca

SEQ ID NO: 50567 - RNA, 21 nt, Homo sapiens
gagcuaggggggucagccagc

SEQ ID NO: 50568 - RNA, 11 nt, Homo sapiens
gagcucgugga

SEQ ID NO: 50569 - RNA, 11 nt, Homo sapiens
gagcucguggg

SEQ ID NO: 50570 - RNA, 19 nt, Homo sapiens
gagcugccucucucaucca

SEQ ID NO: 50571 - RNA, 18 nt, Homo sapiens
gagcuugaaauagugucu

SEQ ID NO: 50572 - RNA, 13 nt, Homo sapiens
gaggaaagagaga

SEQ ID NO: 50573 - RNA, 14 nt, Homo sapiens
gaggaaagagagac

SEQ ID NO: 50574 - RNA, 15 nt, Homo sapiens
gaggaaagagagaca

SEQ ID NO: 50575 - RNA, 19 nt, Homo sapiens
gaggaauccaagaaaaugg

SEQ ID NO: 50576 - RNA, 18 nt, Homo sapiens
gaggacuugggcgggaca

SEQ ID NO: 50577 - RNA, 15 nt, Homo sapiens
gaggagaaacuggaa

SEQ ID NO: 50578 - RNA, 14 nt, Homo sapiens
gaggagccugcaac

SEQ ID NO: 50579 - RNA, 16 nt, Homo sapiens
gaggagccugcaacau

SEQ ID NO: 50580 - RNA, 23 nt, Homo sapiens
gaggauguguggcauuuucacuu

SEQ ID NO: 50581 - RNA, 20 nt, Homo sapiens
gaggcaagagaauugcuuga

SEQ ID NO: 50582 - RNA, 21 nt, Homo sapiens
gaggcauuugcagcugugcca

SEQ ID NO: 50583 - RNA, 13 nt, Homo sapiens
gaggccuccucuc

SEQ ID NO: 50584 - RNA, 15 nt, Homo sapiens
gaggcggguggauca

SEQ ID NO: 50585 - RNA, 16 nt, Homo sapiens
gaggcugaggcaagag

SEQ ID NO: 50586 - RNA, 17 nt, Homo sapiens
gaggcugaggcgggugg

SEQ ID NO: 50587 - RNA, 18 nt, Homo sapiens
gaggcugaggcgggugga

SEQ ID NO: 50588 - RNA, 16 nt, Homo sapiens
gagggcgcggggcggg

SEQ ID NO: 50589 - RNA, 22 nt, Homo sapiens
gagggcgcggggcggggagcga

SEQ ID NO: 50590 - RNA, 14 nt, Homo sapiens
gagggcuaauaucu

SEQ ID NO: 50591 - RNA, 10 nt, Homo sapiens
gagggcuuga

SEQ ID NO: 50592 - RNA, 11 nt, Homo sapiens
gaggggcgcuc

SEQ ID NO: 50593 - RNA, 12 nt, Homo sapiens
gaggggcgcucg

SEQ ID NO: 50594 - RNA, 13 nt, Homo sapiens
gaggggcgcucgc

SEQ ID NO: 50595 - RNA, 17 nt, Homo sapiens
gagggggcgcgugcagg

SEQ ID NO: 50596 - RNA, 15 nt, Homo sapiens
gagguuaagcacuuu

SEQ ID NO: 50597 - RNA, 11 nt, Homo sapiens
gaguacuuccc

SEQ ID NO: 50598 - RNA, 16 nt, Homo sapiens
gaguacuucccgcugu

SEQ ID NO: 50599 - RNA, 22 nt, Homo sapiens
gaguacuucccgcuguuccucg

SEQ ID NO: 50600 - RNA, 20 nt, Homo sapiens
gagugacuuaguguacauga

SEQ ID NO: 50601 - RNA, 15 nt, Homo sapiens
gagugcaguggcgca

SEQ ID NO: 50602 - RNA, 18 nt, Homo sapiens
gagugcaguggcgcaauc

SEQ ID NO: 50603 - RNA, 21 nt, Homo sapiens
gaguggcauguaugacgugac

SEQ ID NO: 50604 - RNA, 14 nt, Homo sapiens
gaguggcgcgcgcc

SEQ ID NO: 50605 - RNA, 18 nt, Homo sapiens
gaguuaggcuauucacaa

SEQ ID NO: 50606 - RNA, 17 nt, Homo sapiens
gaguuccuaaccagccu

SEQ ID NO: 50607 - RNA, 18 nt, Homo sapiens
gaguucugucuggacuuu

SEQ ID NO: 50608 - RNA, 13 nt, Homo sapiens
gauaaacucagaa

SEQ ID NO: 50609 - RNA, 13 nt, Homo sapiens
gauaaagcacugu

SEQ ID NO: 50610 - RNA, 19 nt, Homo sapiens
gauaagcuauguuguugca

SEQ ID NO: 50611 - RNA, 20 nt, Homo sapiens
gauaauaaaauucauuccau

SEQ ID NO: 50612 - RNA, 18 nt, Homo sapiens
gauaaucucuccauuccc

SEQ ID NO: 50613 - RNA, 20 nt, Homo sapiens
gauacaaugaacacuuauaa

SEQ ID NO: 50614 - RNA, 11 nt, Homo sapiens
gauacagaaaa

SEQ ID NO: 50615 - RNA, 15 nt, Homo sapiens
gauaccaugaugcug

SEQ ID NO: 50616 - RNA, 12 nt, Homo sapiens
gauacuauuuaa

SEQ ID NO: 50617 - RNA, 19 nt, Homo sapiens
gauacuauuuaauuauuuc

SEQ ID NO: 50618 - RNA, 22 nt, Homo sapiens
gauacuguaucaugacaaagac

SEQ ID NO: 50619 - RNA, 14 nt, Homo sapiens
gauagagugggaca

SEQ ID NO: 50620 - RNA, 12 nt, Homo sapiens
gauagcaaguga

SEQ ID NO: 50621 - RNA, 12 nt, Homo sapiens
gauaggccaugg

SEQ ID NO: 50622 - RNA, 21 nt, Homo sapiens
gauagguuaccaguaacggaa

SEQ ID NO: 50623 - RNA, 21 nt, Homo sapiens
gauaucaugccccuguacucc

SEQ ID NO: 50624 - RNA, 14 nt, Homo sapiens
gauaucccaggaaa

SEQ ID NO: 50625 - RNA, 16 nt, Homo sapiens
gauaugccuuuuccca

SEQ ID NO: 50626 - RNA, 21 nt, Homo sapiens
gauaugccuuuucccaacucc

SEQ ID NO: 50627 - RNA, 20 nt, Homo sapiens
gauauguaacaacaauuauu

SEQ ID NO: 50628 - RNA, 15 nt, Homo sapiens
gauauuaacugagaa

SEQ ID NO: 50629 - RNA, 15 nt, Homo sapiens
gauauucucuaguca

SEQ ID NO: 50630 - RNA, 16 nt, Homo sapiens
gaucaaugugacggca

SEQ ID NO: 50631 - RNA, 21 nt, Homo sapiens
gaucaaugugacggcagggaa

SEQ ID NO: 50632 - RNA, 17 nt, Homo sapiens
gaucaguaugaaaaugu

SEQ ID NO: 50633 - RNA, 18 nt, Homo sapiens
gaucauuucaaaacucau

SEQ ID NO: 50634 - RNA, 13 nt, Homo sapiens
gauccgcccaucu

SEQ ID NO: 50635 - RNA, 19 nt, Homo sapiens
gauccgcccaucuccgucu

SEQ ID NO: 50636 - RNA, 17 nt, Homo sapiens
gauccugcaauuccacu

SEQ ID NO: 50637 - RNA, 16 nt, Homo sapiens
gaucucacaagcacuu

SEQ ID NO: 50638 - RNA, 17 nt, Homo sapiens
gaucucacaagcacuuu

SEQ ID NO: 50639 - RNA, 19 nt, Homo sapiens
gaucugcaacuacuaucca

SEQ ID NO: 50640 - RNA, 16 nt, Homo sapiens
gaucugcuuggucuug

SEQ ID NO: 50641 - RNA, 23 nt, Homo sapiens
gaugaaaacauagcaucucagga

SEQ ID NO: 50642 - RNA, 15 nt, Homo sapiens
gaugaucauguauuu

SEQ ID NO: 50643 - RNA, 17 nt, Homo sapiens
gaugcaguucugaagaa

SEQ ID NO: 50644 - RNA, 19 nt, Homo sapiens
gaugcaguuguugcccaca

SEQ ID NO: 50645 - RNA, 17 nt, Homo sapiens
gaugcuuguacauaaug

SEQ ID NO: 50646 - RNA, 18 nt, Homo sapiens
gauggaaguugcagugag

SEQ ID NO: 50647 - RNA, 18 nt, Homo sapiens
gauguagaggagaaacug

SEQ ID NO: 50648 - RNA, 15 nt, Homo sapiens
gauguauagguugau

SEQ ID NO: 50649 - RNA, 14 nt, Homo sapiens
gaugugaacacauc

SEQ ID NO: 50650 - RNA, 19 nt, Homo sapiens
gauguggagggggcgcgug

SEQ ID NO: 50651 - RNA, 21 nt, Homo sapiens
gauguuuagaaacacaacuau

SEQ ID NO: 50652 - RNA, 22 nt, Homo sapiens
gauguuuagaaacacaacuaua

SEQ ID NO: 50653 - RNA, 22 nt, Homo sapiens
gauguuuucacaaagaacagga

SEQ ID NO: 50654 - RNA, 23 nt, Homo sapiens
gauguuuucacaaagaacaggaa

SEQ ID NO: 50655 - RNA, 17 nt, Homo sapiens
gauguuuucauagagaa

SEQ ID NO: 50656 - RNA, 20 nt, Homo sapiens
gauuaacucuaccugcacac

SEQ ID NO: 50657 - RNA, 23 nt, Homo sapiens
gauuacaaggcuuuaucucaggg

SEQ ID NO: 50658 - RNA, 14 nt, Homo sapiens
gauuacccucuggg

SEQ ID NO: 50659 - RNA, 15 nt, Homo sapiens
gauuacccucugggu

SEQ ID NO: 50660 - RNA, 19 nt, Homo sapiens
gauucaagugauccgccca

SEQ ID NO: 50661 - RNA, 21 nt, Homo sapiens
gauucccagccagcacagccu

SEQ ID NO: 50662 - RNA, 22 nt, Homo sapiens
gauucccugagcaggauuuuaa

SEQ ID NO: 50663 - RNA, 13 nt, Homo sapiens
gauuccucacuuu

SEQ ID NO: 50664 - RNA, 14 nt, Homo sapiens
gauuccucacuuug

SEQ ID NO: 50665 - RNA, 18 nt, Homo sapiens
gauuguaaaaugguguga

SEQ ID NO: 50666 - RNA, 12 nt, Homo sapiens
gauugugggaua

SEQ ID NO: 50667 - RNA, 19 nt, Homo sapiens
gauugugggauacuauuua

SEQ ID NO: 50668 - RNA, 19 nt, Homo sapiens
gauuuuauaugcuauuuau

SEQ ID NO: 50669 - RNA, 15 nt, Homo sapiens
gauuuuaugcuuuaa

SEQ ID NO: 50670 - RNA, 21 nt, Homo sapiens
gcaaacugccaucauuuacuu

SEQ ID NO: 50671 - RNA, 17 nt, Homo sapiens
gcaaagaugaucaguau

SEQ ID NO: 50672 - RNA, 19 nt, Homo sapiens
gcaaaugagccggagcccc

SEQ ID NO: 50673 - RNA, 14 nt, Homo sapiens
gcaaaugcuguauu

SEQ ID NO: 50674 - RNA, 23 nt, Homo sapiens
gcaaaugcuguauucuucuuugg

SEQ ID NO: 50675 - RNA, 16 nt, Homo sapiens
gcaaauggccaaugag

SEQ ID NO: 50676 - RNA, 21 nt, Homo sapiens
gcaaauugucacaggacagcc

SEQ ID NO: 50677 - RNA, 19 nt, Homo sapiens
gcaacccaaauguucauca

SEQ ID NO: 50678 - RNA, 13 nt, Homo sapiens
gcaaccuccaccu

SEQ ID NO: 50679 - RNA, 18 nt, Homo sapiens
gcaaccuccaccuucugg

SEQ ID NO: 50680 - RNA, 22 nt, Homo sapiens
gcaaccuccaccuucuggguuc

SEQ ID NO: 50681 - RNA, 16 nt, Homo sapiens
gcaaccuuuggaugca

SEQ ID NO: 50682 - RNA, 12 nt, Homo sapiens
gcaacucugaag

SEQ ID NO: 50683 - RNA, 16 nt, Homo sapiens
gcaauaaaauguauuu

SEQ ID NO: 50684 - RNA, 23 nt, Homo sapiens
gcaaucuuaacucauugcaaccu

SEQ ID NO: 50685 - RNA, 20 nt, Homo sapiens
gcaaucuucucagaaggcaa

SEQ ID NO: 50686 - RNA, 21 nt, Homo sapiens
gcaaucuucucagaaggcaaa

SEQ ID NO: 50687 - RNA, 15 nt, Homo sapiens
gcaaugugacuuaau

SEQ ID NO: 50688 - RNA, 15 nt, Homo sapiens
gcacacagugcuuuc

SEQ ID NO: 50689 - RNA, 16 nt, Homo sapiens
gcacacagugcuuucc

SEQ ID NO: 50690 - RNA, 22 nt, Homo sapiens
gcacacucucccauuauauuua

SEQ ID NO: 50691 - RNA, 22 nt, Homo sapiens
gcacagccucuuagaugcaguu

SEQ ID NO: 50692 - RNA, 19 nt, Homo sapiens
gcacagugaucaaguuauu

SEQ ID NO: 50693 - RNA, 15 nt, Homo sapiens
gcacauauccuuagc

SEQ ID NO: 50694 - RNA, 14 nt, Homo sapiens
gcaccaacuuugaa

SEQ ID NO: 50695 - RNA, 15 nt, Homo sapiens
gcaccaaucaugaau

SEQ ID NO: 50696 - RNA, 22 nt, Homo sapiens
gcaccgcuguacgcgagcgcgc

SEQ ID NO: 50697 - RNA, 23 nt, Homo sapiens
gcaccgcuguacgcgagcgcgcg

SEQ ID NO: 50698 - RNA, 15 nt, Homo sapiens
gcaccuacaguguac

SEQ ID NO: 50699 - RNA, 12 nt, Homo sapiens
gcaccugcaggc

SEQ ID NO: 50700 - RNA, 14 nt, Homo sapiens
gcaccugcaggcgu

SEQ ID NO: 50701 - RNA, 15 nt, Homo sapiens
gcaccugcaggcgug

SEQ ID NO: 50702 - RNA, 16 nt, Homo sapiens
gcaccugcaggcguga

SEQ ID NO: 50703 - RNA, 16 nt, Homo sapiens
gcaccuguaaucccag

SEQ ID NO: 50704 - RNA, 22 nt, Homo sapiens
gcaccuuuagaauauuaaaaau

SEQ ID NO: 50705 - RNA, 15 nt, Homo sapiens
gcacgauuucuguuu

SEQ ID NO: 50706 - RNA, 19 nt, Homo sapiens
gcacgcauggaaaaguuuc

SEQ ID NO: 50707 - RNA, 20 nt, Homo sapiens
gcacgcauggaaaaguuucc

SEQ ID NO: 50708 - RNA, 22 nt, Homo sapiens
gcacuaaucaauacuuugaaca

SEQ ID NO: 50709 - RNA, 17 nt, Homo sapiens
gcacuccagccugagcg

SEQ ID NO: 50710 - RNA, 13 nt, Homo sapiens
gcacucuauguuc

SEQ ID NO: 50711 - RNA, 17 nt, Homo sapiens
gcacuuuaacacagugu

SEQ ID NO: 50712 - RNA, 19 nt, Homo sapiens
gcacuuuaacacagugucu

SEQ ID NO: 50713 - RNA, 22 nt, Homo sapiens
gcacuuuaacacagugucuggc

SEQ ID NO: 50714 - RNA, 21 nt, Homo sapiens
gcacuuucccucuuggugccu

SEQ ID NO: 50715 - RNA, 19 nt, Homo sapiens
gcagagacgggguuugcca

SEQ ID NO: 50716 - RNA, 21 nt, Homo sapiens
gcagagagguuucgauauuua

SEQ ID NO: 50717 - RNA, 21 nt, Homo sapiens
gcagagguugcagugagccga

SEQ ID NO: 50718 - RNA, 15 nt, Homo sapiens
gcagauaaacaguag

SEQ ID NO: 50719 - RNA, 14 nt, Homo sapiens
gcagauuuaagaua

SEQ ID NO: 50720 - RNA, 15 nt, Homo sapiens
gcagcaauaaagcag

SEQ ID NO: 50721 - RNA, 18 nt, Homo sapiens
gcagcaggauagaguggg

SEQ ID NO: 50722 - RNA, 18 nt, Homo sapiens
gcagcauaaauguugaca

SEQ ID NO: 50723 - RNA, 22 nt, Homo sapiens
gcagccaaccuaagcaagaucc

SEQ ID NO: 50724 - RNA, 15 nt, Homo sapiens
gcagcgaguacuucc

SEQ ID NO: 50725 - RNA, 17 nt, Homo sapiens
gcagcgaguacuucccg

SEQ ID NO: 50726 - RNA, 18 nt, Homo sapiens
gcagcgaguacuucccgc

SEQ ID NO: 50727 - RNA, 20 nt, Homo sapiens
gcagcgaguacuucccgcug

SEQ ID NO: 50728 - RNA, 13 nt, Homo sapiens
gcagcucaggcug

SEQ ID NO: 50729 - RNA, 15 nt, Homo sapiens
gcagcucaggcuggc

SEQ ID NO: 50730 - RNA, 16 nt, Homo sapiens
gcagcucaggcuggca

SEQ ID NO: 50731 - RNA, 17 nt, Homo sapiens
gcagcucaggcuggcac

SEQ ID NO: 50732 - RNA, 23 nt, Homo sapiens
gcagcucuaaaugucaaucagcc

SEQ ID NO: 50733 - RNA, 18 nt, Homo sapiens
gcagcuuauucacaagac

SEQ ID NO: 50734 - RNA, 17 nt, Homo sapiens
gcagcuugaaacugaga

SEQ ID NO: 50735 - RNA, 16 nt, Homo sapiens
gcaggaccaucccggc

SEQ ID NO: 50736 - RNA, 18 nt, Homo sapiens
gcaggaccaucccggccg

SEQ ID NO: 50737 - RNA, 21 nt, Homo sapiens
gcaggaccaucccggccggcg

SEQ ID NO: 50738 - RNA, 22 nt, Homo sapiens
gcaggaccaucccggccggcgc

SEQ ID NO: 50739 - RNA, 23 nt, Homo sapiens
gcaggaccaucccggccggcgcg

SEQ ID NO: 50740 - RNA, 14 nt, Homo sapiens
gcaggaggcaucca

SEQ ID NO: 50741 - RNA, 15 nt, Homo sapiens
gcaggcgugaccuga

SEQ ID NO: 50742 - RNA, 19 nt, Homo sapiens
gcaggcgugaccugacagc

SEQ ID NO: 50743 - RNA, 20 nt, Homo sapiens
gcaggcgugaccugacagcc

SEQ ID NO: 50744 - RNA, 15 nt, Homo sapiens
gcaggcuacugucag

SEQ ID NO: 50745 - RNA, 12 nt, Homo sapiens
gcagggacagga

SEQ ID NO: 50746 - RNA, 14 nt, Homo sapiens
gcagggacuugaac

SEQ ID NO: 50747 - RNA, 15 nt, Homo sapiens
gcagggacuugaacc

SEQ ID NO: 50748 - RNA, 16 nt, Homo sapiens
gcagggacuugaaccc

SEQ ID NO: 50749 - RNA, 17 nt, Homo sapiens
gcagggacuugaaccca

SEQ ID NO: 50750 - RNA, 20 nt, Homo sapiens
gcaggucacacaaccugucc

SEQ ID NO: 50751 - RNA, 13 nt, Homo sapiens
gcaguagcagcag

SEQ ID NO: 50752 - RNA, 19 nt, Homo sapiens
gcagucagaagaccugguc

SEQ ID NO: 50753 - RNA, 12 nt, Homo sapiens
gcagugagccga

SEQ ID NO: 50754 - RNA, 12 nt, Homo sapiens
gcagugagcuga

SEQ ID NO: 50755 - RNA, 21 nt, Homo sapiens
gcagugagcugauaucaugcc

SEQ ID NO: 50756 - RNA, 13 nt, Homo sapiens
gcagugaugucac

SEQ ID NO: 50757 - RNA, 13 nt, Homo sapiens
gcagugcuuggcc

SEQ ID NO: 50758 - RNA, 15 nt, Homo sapiens
gcagugcuuggccca

SEQ ID NO: 50759 - RNA, 17 nt, Homo sapiens
gcagugcuuggcccagg

SEQ ID NO: 50760 - RNA, 18 nt, Homo sapiens
gcagugcuuggcccagga

SEQ ID NO: 50761 - RNA, 21 nt, Homo sapiens
gcaguguuucccucuguguua

SEQ ID NO: 50762 - RNA, 13 nt, Homo sapiens
gcaguucugaaga

SEQ ID NO: 50763 - RNA, 14 nt, Homo sapiens
gcaguucugaagaa

SEQ ID NO: 50764 - RNA, 16 nt, Homo sapiens
gcaguucugaagaaga

SEQ ID NO: 50765 - RNA, 17 nt, Homo sapiens
gcaguucugaagaagau

SEQ ID NO: 50766 - RNA, 19 nt, Homo sapiens
gcaguugaaaagacuccaa

SEQ ID NO: 50767 - RNA, 13 nt, Homo sapiens
gcaguuuuccauu

SEQ ID NO: 50768 - RNA, 13 nt, Homo sapiens
gcauaaagucagu

SEQ ID NO: 50769 - RNA, 19 nt, Homo sapiens
gcauacugccuuguuuaau

SEQ ID NO: 50770 - RNA, 13 nt, Homo sapiens
gcauauguuucgc

SEQ ID NO: 50771 - RNA, 15 nt, Homo sapiens
gcaucacaguuuugg

SEQ ID NO: 50772 - RNA, 11 nt, Homo sapiens
gcauccuaguc

SEQ ID NO: 50773 - RNA, 12 nt, Homo sapiens
gcauccuagucu

SEQ ID NO: 50774 - RNA, 19 nt, Homo sapiens
gcauccuagucucuaucau

SEQ ID NO: 50775 - RNA, 16 nt, Homo sapiens
gcaucgcuuaggagaa

SEQ ID NO: 50776 - RNA, 18 nt, Homo sapiens
gcaugaaguaauaugcac

SEQ ID NO: 50777 - RNA, 19 nt, Homo sapiens
gcaugaaguaauaugcaca

SEQ ID NO: 50778 - RNA, 21 nt, Homo sapiens
gcaugaauuuuuuucaucuuc

SEQ ID NO: 50779 - RNA, 22 nt, Homo sapiens
gcaugggaagugacgguuuaau

SEQ ID NO: 50780 - RNA, 19 nt, Homo sapiens
gcauggguuuuauuauaua

SEQ ID NO: 50781 - RNA, 21 nt, Homo sapiens
gcaugguggcgcgcaccugua

SEQ ID NO: 50782 - RNA, 15 nt, Homo sapiens
gcauguaugacguga

SEQ ID NO: 50783 - RNA, 15 nt, Homo sapiens
gcauguuugugauug

SEQ ID NO: 50784 - RNA, 20 nt, Homo sapiens
gcauuaucuagauacuguau

SEQ ID NO: 50785 - RNA, 12 nt, Homo sapiens
gcauucaaaugu

SEQ ID NO: 50786 - RNA, 13 nt, Homo sapiens
gcauuccaacuau

SEQ ID NO: 50787 - RNA, 15 nt, Homo sapiens
gcauuccaacuaucu

SEQ ID NO: 50788 - RNA, 17 nt, Homo sapiens
gcauuguaaaugugcuu

SEQ ID NO: 50789 - RNA, 15 nt, Homo sapiens
gcauuguaacuuaug

SEQ ID NO: 50790 - RNA, 15 nt, Homo sapiens
gcauuuauaaaugga

SEQ ID NO: 50791 - RNA, 13 nt, Homo sapiens
gcauuuguuugaa

SEQ ID NO: 50792 - RNA, 15 nt, Homo sapiens
gcauuuucacuuuug

SEQ ID NO: 50793 - RNA, 16 nt, Homo sapiens
gcauuuucacuuuugg

SEQ ID NO: 50794 - RNA, 9 nt, Homo sapiens
gccaaaaac

SEQ ID NO: 50795 - RNA, 16 nt, Homo sapiens
gccaacuaggcagcca

SEQ ID NO: 50796 - RNA, 17 nt, Homo sapiens
gccaaggcuggagugca

SEQ ID NO: 50797 - RNA, 20 nt, Homo sapiens
gccaaggcuggagugcagug

SEQ ID NO: 50798 - RNA, 21 nt, Homo sapiens
gccaaggcuggagugcagugg

SEQ ID NO: 50799 - RNA, 22 nt, Homo sapiens
gccaaggcuggagugcaguggc

SEQ ID NO: 50800 - RNA, 15 nt, Homo sapiens
gccaccaaacccggc

SEQ ID NO: 50801 - RNA, 13 nt, Homo sapiens
gccaccuccugcc

SEQ ID NO: 50802 - RNA, 17 nt, Homo sapiens
gccacgcucugggucgc

SEQ ID NO: 50803 - RNA, 18 nt, Homo sapiens
gccacgcucugggucgcc

SEQ ID NO: 50804 - RNA, 21 nt, Homo sapiens
gccacgcucugggucgccggc

SEQ ID NO: 50805 - RNA, 22 nt, Homo sapiens
gccacgcucugggucgccggca

SEQ ID NO: 50806 - RNA, 23 nt, Homo sapiens
gccacgcucugggucgccggcau

SEQ ID NO: 50807 - RNA, 15 nt, Homo sapiens
gccacuucacuuuuu

SEQ ID NO: 50808 - RNA, 14 nt, Homo sapiens
gccagaagucaagg

SEQ ID NO: 50809 - RNA, 15 nt, Homo sapiens
gccagaagucaaggc

SEQ ID NO: 50810 - RNA, 17 nt, Homo sapiens
gccagacaucaacagau

SEQ ID NO: 50811 - RNA, 18 nt, Homo sapiens
gccagauuuuccugaaaa

SEQ ID NO: 50812 - RNA, 12 nt, Homo sapiens
gccagcaaauuc

SEQ ID NO: 50813 - RNA, 22 nt, Homo sapiens
gccaggaaucacuggcuguuaa

SEQ ID NO: 50814 - RNA, 14 nt, Homo sapiens
gccaggcuggucuc

SEQ ID NO: 50815 - RNA, 22 nt, Homo sapiens
gccaguaaaugggggugcauuu

SEQ ID NO: 50816 - RNA, 15 nt, Homo sapiens
gccagugagaucaau

SEQ ID NO: 50817 - RNA, 15 nt, Homo sapiens
gccaguuauggcuau

SEQ ID NO: 50818 - RNA, 19 nt, Homo sapiens
gccauaauuacuaugucau

SEQ ID NO: 50819 - RNA, 14 nt, Homo sapiens
gccaugaaucaccu

SEQ ID NO: 50820 - RNA, 19 nt, Homo sapiens
gccaugagaguucugucac

SEQ ID NO: 50821 - RNA, 16 nt, Homo sapiens
gccaugcuggccaggc

SEQ ID NO: 50822 - RNA, 15 nt, Homo sapiens
gccauggagguuaag

SEQ ID NO: 50823 - RNA, 20 nt, Homo sapiens
gccaugugauuacccucugg

SEQ ID NO: 50824 - RNA, 22 nt, Homo sapiens
gccaugugauuacccucugggu

SEQ ID NO: 50825 - RNA, 22 nt, Homo sapiens
gcccaacuguuauagguuguug

SEQ ID NO: 50826 - RNA, 14 nt, Homo sapiens
gcccaagggugggu

SEQ ID NO: 50827 - RNA, 22 nt, Homo sapiens
gcccacaccagggccuggcugg

SEQ ID NO: 50828 - RNA, 22 nt, Homo sapiens
gcccacagcuguaugauuccca

SEQ ID NO: 50829 - RNA, 19 nt, Homo sapiens
gcccacggcuggagcugcc

SEQ ID NO: 50830 - RNA, 15 nt, Homo sapiens
gcccacuuccucccg

SEQ ID NO: 50831 - RNA, 17 nt, Homo sapiens
gcccacuuccucccggc

SEQ ID NO: 50832 - RNA, 19 nt, Homo sapiens
gcccacuuccucccggccg

SEQ ID NO: 50833 - RNA, 20 nt, Homo sapiens
gcccacuuccucccggccgc

SEQ ID NO: 50834 - RNA, 21 nt, Homo sapiens
gcccacuuccucccggccgcg

SEQ ID NO: 50835 - RNA, 23 nt, Homo sapiens
gcccacuuccucccggccgcgcu

SEQ ID NO: 50836 - RNA, 11 nt, Homo sapiens
gcccagcuaau

SEQ ID NO: 50837 - RNA, 19 nt, Homo sapiens
gcccaggaguuuggccaga

SEQ ID NO: 50838 - RNA, 12 nt, Homo sapiens
gcccauccugcc

SEQ ID NO: 50839 - RNA, 21 nt, Homo sapiens
gcccauccugccccugagccc

SEQ ID NO: 50840 - RNA, 18 nt, Homo sapiens
gcccaucuccgucuccca

SEQ ID NO: 50841 - RNA, 20 nt, Homo sapiens
gcccaucuccgucucccaaa

SEQ ID NO: 50842 - RNA, 23 nt, Homo sapiens
gcccaucuuucaagggaccucuc

SEQ ID NO: 50843 - RNA, 15 nt, Homo sapiens
gccccaggcgggucc

SEQ ID NO: 50844 - RNA, 16 nt, Homo sapiens
gccccaggcggguccg

SEQ ID NO: 50845 - RNA, 17 nt, Homo sapiens
gccccaggcggguccgg

SEQ ID NO: 50846 - RNA, 22 nt, Homo sapiens
gccccaggcggguccgggucgc

SEQ ID NO: 50847 - RNA, 14 nt, Homo sapiens
gcccccgggccgac

SEQ ID NO: 50848 - RNA, 15 nt, Homo sapiens
gcccccgggccgacg

SEQ ID NO: 50849 - RNA, 16 nt, Homo sapiens
gcccccgggccgacgg

SEQ ID NO: 50850 - RNA, 20 nt, Homo sapiens
gcccccgggccgacggagcc

SEQ ID NO: 50851 - RNA, 22 nt, Homo sapiens
gcccccgggccgacggagccgg

SEQ ID NO: 50852 - RNA, 19 nt, Homo sapiens
gccccgggaguggcgcgcg

SEQ ID NO: 50853 - RNA, 13 nt, Homo sapiens
gccccggggaggg

SEQ ID NO: 50854 - RNA, 18 nt, Homo sapiens
gccccggggaggggcgcu

SEQ ID NO: 50855 - RNA, 13 nt, Homo sapiens
gccccugcacucc

SEQ ID NO: 50856 - RNA, 18 nt, Homo sapiens
gccccugcacuccagccu

SEQ ID NO: 50857 - RNA, 19 nt, Homo sapiens
gccccuguacuccagccug

SEQ ID NO: 50858 - RNA, 20 nt, Homo sapiens
gccccuguacuccagccugg

SEQ ID NO: 50859 - RNA, 18 nt, Homo sapiens
gccccuugggcaggucac

SEQ ID NO: 50860 - RNA, 15 nt, Homo sapiens
gcccggaaacuccac

SEQ ID NO: 50861 - RNA, 13 nt, Homo sapiens
gcccuagcauuuc

SEQ ID NO: 50862 - RNA, 14 nt, Homo sapiens
gcccucuggcugcu

SEQ ID NO: 50863 - RNA, 15 nt, Homo sapiens
gcccucuggcugcug

SEQ ID NO: 50864 - RNA, 20 nt, Homo sapiens
gcccucuggcugcugguggc

SEQ ID NO: 50865 - RNA, 22 nt, Homo sapiens
gcccucuggcugcugguggcgc

SEQ ID NO: 50866 - RNA, 20 nt, Homo sapiens
gcccugaaagucccagauca

SEQ ID NO: 50867 - RNA, 12 nt, Homo sapiens
gcccugccaugc

SEQ ID NO: 50868 - RNA, 19 nt, Homo sapiens
gcccugcccuuacaggaac

SEQ ID NO: 50869 - RNA, 14 nt, Homo sapiens
gcccugcugcugcc

SEQ ID NO: 50870 - RNA, 16 nt, Homo sapiens
gcccugcugcugccug

SEQ ID NO: 50871 - RNA, 12 nt, Homo sapiens
gcccugugcggc

SEQ ID NO: 50872 - RNA, 15 nt, Homo sapiens
gcccugugcggccug

SEQ ID NO: 50873 - RNA, 15 nt, Homo sapiens
gcccuucaugcauuu

SEQ ID NO: 50874 - RNA, 18 nt, Homo sapiens
gcccuucauguacaucca

SEQ ID NO: 50875 - RNA, 13 nt, Homo sapiens
gccgacggagccg

SEQ ID NO: 50876 - RNA, 16 nt, Homo sapiens
gccgacggagccggga

SEQ ID NO: 50877 - RNA, 18 nt, Homo sapiens
gccgagauugugccccug

SEQ ID NO: 50878 - RNA, 19 nt, Homo sapiens
gccgagauugugccccugc

SEQ ID NO: 50879 - RNA, 13 nt, Homo sapiens
gccgcgcuccucg

SEQ ID NO: 50880 - RNA, 14 nt, Homo sapiens
gccgcgcuccucgg

SEQ ID NO: 50881 - RNA, 11 nt, Homo sapiens
gccgcgcugcg

SEQ ID NO: 50882 - RNA, 12 nt, Homo sapiens
gccgcgcugcgc

SEQ ID NO: 50883 - RNA, 17 nt, Homo sapiens
gccgcgcugcgcgccgc

SEQ ID NO: 50884 - RNA, 23 nt, Homo sapiens
gccgcgcugcgcgccgcgcuccu

SEQ ID NO: 50885 - RNA, 13 nt, Homo sapiens
gccggagccccuu

SEQ ID NO: 50886 - RNA, 15 nt, Homo sapiens
gccggagccccuugg

SEQ ID NO: 50887 - RNA, 23 nt, Homo sapiens
gccggagccccuugggcagguca

SEQ ID NO: 50888 - RNA, 11 nt, Homo sapiens
gccggagccuc

SEQ ID NO: 50889 - RNA, 12 nt, Homo sapiens
gccggagccucc

SEQ ID NO: 50890 - RNA, 16 nt, Homo sapiens
gccggagccuccagcu

SEQ ID NO: 50891 - RNA, 17 nt, Homo sapiens
gccggagccuccagcug

SEQ ID NO: 50892 - RNA, 19 nt, Homo sapiens
gccggagccuccagcugcc

SEQ ID NO: 50893 - RNA, 13 nt, Homo sapiens
gccggcgcgcuca

SEQ ID NO: 50894 - RNA, 15 nt, Homo sapiens
gccggcgcgcucauc

SEQ ID NO: 50895 - RNA, 16 nt, Homo sapiens
gccggcgcgcucaucc

SEQ ID NO: 50896 - RNA, 22 nt, Homo sapiens
gccggcgcgcucaucccacccg

SEQ ID NO: 50897 - RNA, 16 nt, Homo sapiens
gccgggaaagaagagc

SEQ ID NO: 50898 - RNA, 17 nt, Homo sapiens
gccgggaaagaagagcc

SEQ ID NO: 50899 - RNA, 22 nt, Homo sapiens
gccgggaaagaagagccggagc

SEQ ID NO: 50900 - RNA, 23 nt, Homo sapiens
gccgggaaagaagagccggagcc

SEQ ID NO: 50901 - RNA, 15 nt, Homo sapiens
gccgggcaugguggc

SEQ ID NO: 50902 - RNA, 14 nt, Homo sapiens
gccgggcgcggugg

SEQ ID NO: 50903 - RNA, 19 nt, Homo sapiens
gccgguccuugcugcaccu

SEQ ID NO: 50904 - RNA, 14 nt, Homo sapiens
gccguccccagagc

SEQ ID NO: 50905 - RNA, 14 nt, Homo sapiens
gccgugggccugag

SEQ ID NO: 50906 - RNA, 16 nt, Homo sapiens
gccuagcccacuggcu

SEQ ID NO: 50907 - RNA, 19 nt, Homo sapiens
gccuagcccacuggcuccc

SEQ ID NO: 50908 - RNA, 17 nt, Homo sapiens
gccucaaucaguauuca

SEQ ID NO: 50909 - RNA, 13 nt, Homo sapiens
gccucaccucuca

SEQ ID NO: 50910 - RNA, 14 nt, Homo sapiens
gccucagcucucag

SEQ ID NO: 50911 - RNA, 20 nt, Homo sapiens
gccucagggugcacacagga

SEQ ID NO: 50912 - RNA, 12 nt, Homo sapiens
gccucaguuucc

SEQ ID NO: 50913 - RNA, 11 nt, Homo sapiens
gccuccagcug

SEQ ID NO: 50914 - RNA, 13 nt, Homo sapiens
gccuccagcugcc

SEQ ID NO: 50915 - RNA, 19 nt, Homo sapiens
gccuccagcugccccgggg

SEQ ID NO: 50916 - RNA, 13 nt, Homo sapiens
gccuccccagcuc

SEQ ID NO: 50917 - RNA, 16 nt, Homo sapiens
gccuccgcuacuucca

SEQ ID NO: 50918 - RNA, 21 nt, Homo sapiens
gccuccgcuacuuccagggcu

SEQ ID NO: 50919 - RNA, 13 nt, Homo sapiens
gccucuauugcca

SEQ ID NO: 50920 - RNA, 15 nt, Homo sapiens
gccucuauugccaug

SEQ ID NO: 50921 - RNA, 16 nt, Homo sapiens
gccucuauugccauga

SEQ ID NO: 50922 - RNA, 15 nt, Homo sapiens
gccucuuagaugcag

SEQ ID NO: 50923 - RNA, 20 nt, Homo sapiens
gccugagaccaaggcccccg

SEQ ID NO: 50924 - RNA, 23 nt, Homo sapiens
gccugagaccaaggcccccgggc

SEQ ID NO: 50925 - RNA, 19 nt, Homo sapiens
gccugaguguugccuaauu

SEQ ID NO: 50926 - RNA, 15 nt, Homo sapiens
gccugcaacaugcca

SEQ ID NO: 50927 - RNA, 15 nt, Homo sapiens
gccugcucgcccacu

SEQ ID NO: 50928 - RNA, 19 nt, Homo sapiens
gccugcucgcccacuuccu

SEQ ID NO: 50929 - RNA, 22 nt, Homo sapiens
gccugcucgcccacuuccuccc

SEQ ID NO: 50930 - RNA, 23 nt, Homo sapiens
gccugcucgcccacuuccucccg

SEQ ID NO: 50931 - RNA, 11 nt, Homo sapiens
gccugcuggau

SEQ ID NO: 50932 - RNA, 12 nt, Homo sapiens
gccugcuggaug

SEQ ID NO: 50933 - RNA, 13 nt, Homo sapiens
gccugcuggaugu

SEQ ID NO: 50934 - RNA, 17 nt, Homo sapiens
gccugcuggauguggag

SEQ ID NO: 50935 - RNA, 23 nt, Homo sapiens
gccugcuggauguggagggggcg

SEQ ID NO: 50936 - RNA, 21 nt, Homo sapiens
gccuggaucucacaagcacuu

SEQ ID NO: 50937 - RNA, 22 nt, Homo sapiens
gccuggaucucacaagcacuuu

SEQ ID NO: 50938 - RNA, 13 nt, Homo sapiens
gccuggcugggag

SEQ ID NO: 50939 - RNA, 14 nt, Homo sapiens
gccugggugacaga

SEQ ID NO: 50940 - RNA, 21 nt, Homo sapiens
gccuggucuaccuguucgcgc

SEQ ID NO: 50941 - RNA, 22 nt, Homo sapiens
gccuggucuaccuguucgcgcg

SEQ ID NO: 50942 - RNA, 19 nt, Homo sapiens
gccuguaaucccagcacuu

SEQ ID NO: 50943 - RNA, 20 nt, Homo sapiens
gccuguugaagaugcuugua

SEQ ID NO: 50944 - RNA, 16 nt, Homo sapiens
gccuugcuccuggcug

SEQ ID NO: 50945 - RNA, 17 nt, Homo sapiens
gccuugcuccuggcugg

SEQ ID NO: 50946 - RNA, 15 nt, Homo sapiens
gccuugguauagcau

SEQ ID NO: 50947 - RNA, 17 nt, Homo sapiens
gccuugguauagcauau

SEQ ID NO: 50948 - RNA, 14 nt, Homo sapiens
gccuuguuuaaugu

SEQ ID NO: 50949 - RNA, 21 nt, Homo sapiens
gccuuuguugcuaucaaucca

SEQ ID NO: 50950 - RNA, 22 nt, Homo sapiens
gcgaaugguuccauucucucuc

SEQ ID NO: 50951 - RNA, 21 nt, Homo sapiens
gcgacaguuuuccuucucauc

SEQ ID NO: 50952 - RNA, 13 nt, Homo sapiens
gcgagccccaggc

SEQ ID NO: 50953 - RNA, 15 nt, Homo sapiens
gcgagccccaggcgg

SEQ ID NO: 50954 - RNA, 16 nt, Homo sapiens
gcgagccccaggcggg

SEQ ID NO: 50955 - RNA, 11 nt, Homo sapiens
gcgagcgcgcg

SEQ ID NO: 50956 - RNA, 16 nt, Homo sapiens
gcgagcgcgcgcgccc

SEQ ID NO: 50957 - RNA, 19 nt, Homo sapiens
gcgagcgcgcgcgcccucu

SEQ ID NO: 50958 - RNA, 12 nt, Homo sapiens
gcgaguacuucc

SEQ ID NO: 50959 - RNA, 16 nt, Homo sapiens
gcgaguacuucccgcu

SEQ ID NO: 50960 - RNA, 21 nt, Homo sapiens
gcgaguacuucccgcuguucc

SEQ ID NO: 50961 - RNA, 22 nt, Homo sapiens
gcgaguacuucccgcuguuccu

SEQ ID NO: 50962 - RNA, 23 nt, Homo sapiens
gcgaguacuucccgcuguuccuc

SEQ ID NO: 50963 - RNA, 16 nt, Homo sapiens
gcgcagccaugugauu

SEQ ID NO: 50964 - RNA, 13 nt, Homo sapiens
gcgcagcucaggc

SEQ ID NO: 50965 - RNA, 18 nt, Homo sapiens
gcgcagcucaggcuggca

SEQ ID NO: 50966 - RNA, 14 nt, Homo sapiens
gcgccaccacgccc

SEQ ID NO: 50967 - RNA, 14 nt, Homo sapiens
gcgcccucuggcug

SEQ ID NO: 50968 - RNA, 17 nt, Homo sapiens
gcgcccucuggcugcug

SEQ ID NO: 50969 - RNA, 23 nt, Homo sapiens
gcgcccucuggcugcugguggcg

SEQ ID NO: 50970 - RNA, 18 nt, Homo sapiens
gcgccgcgcuccucggac

SEQ ID NO: 50971 - RNA, 23 nt, Homo sapiens
gcgccgcgcuccucggacggcuc

SEQ ID NO: 50972 - RNA, 14 nt, Homo sapiens
gcgccuaauguguu

SEQ ID NO: 50973 - RNA, 17 nt, Homo sapiens
gcgccuccgcuacuucc

SEQ ID NO: 50974 - RNA, 22 nt, Homo sapiens
gcgcgcaccuguaaucccagcu

SEQ ID NO: 50975 - RNA, 23 nt, Homo sapiens
gcgcgcaccuguaaucccagcua

SEQ ID NO: 50976 - RNA, 13 nt, Homo sapiens
gcgcgccaccacg

SEQ ID NO: 50977 - RNA, 19 nt, Homo sapiens
gcgcgcccucuggcugcug

SEQ ID NO: 50978 - RNA, 20 nt, Homo sapiens
gcgcgcccucuggcugcugg

SEQ ID NO: 50979 - RNA, 12 nt, Homo sapiens
gcgcgccgcgcu

SEQ ID NO: 50980 - RNA, 15 nt, Homo sapiens
gcgcgccgcgcuccu

SEQ ID NO: 50981 - RNA, 16 nt, Homo sapiens
gcgcgccgcgcuccuc

SEQ ID NO: 50982 - RNA, 18 nt, Homo sapiens
gcgcgccgcgcuccucgg

SEQ ID NO: 50983 - RNA, 11 nt, Homo sapiens
gcgcgccuccg

SEQ ID NO: 50984 - RNA, 12 nt, Homo sapiens
gcgcgccuccgc

SEQ ID NO: 50985 - RNA, 17 nt, Homo sapiens
gcgcgccuccgcuacuu

SEQ ID NO: 50986 - RNA, 16 nt, Homo sapiens
gcgcgcgccaccacgc

SEQ ID NO: 50987 - RNA, 13 nt, Homo sapiens
gcgcgcgcgcccu

SEQ ID NO: 50988 - RNA, 14 nt, Homo sapiens
gcgcgcgcgcccuc

SEQ ID NO: 50989 - RNA, 15 nt, Homo sapiens
gcgcgcgcgcccucu

SEQ ID NO: 50990 - RNA, 21 nt, Homo sapiens
gcgcgcucaucccacccgccc

SEQ ID NO: 50991 - RNA, 22 nt, Homo sapiens
gcgcgcucaucccacccgccca

SEQ ID NO: 50992 - RNA, 12 nt, Homo sapiens
gcgcgcuccgcg

SEQ ID NO: 50993 - RNA, 16 nt, Homo sapiens
gcgcgcuccgcgcagc

SEQ ID NO: 50994 - RNA, 17 nt, Homo sapiens
gcgcgcuccgcgcagcu

SEQ ID NO: 50995 - RNA, 19 nt, Homo sapiens
gcgcgcuccgcgcagcuca

SEQ ID NO: 50996 - RNA, 14 nt, Homo sapiens
gcgcggggcgggga

SEQ ID NO: 50997 - RNA, 23 nt, Homo sapiens
gcgcggggcggggagcgagcccc

SEQ ID NO: 50998 - RNA, 13 nt, Homo sapiens
gcgcgugcaggca

SEQ ID NO: 50999 - RNA, 20 nt, Homo sapiens
gcgcuaccucuccagccuca

SEQ ID NO: 51000 - RNA, 22 nt, Homo sapiens
gcgcuaccucuccagccucagc

SEQ ID NO: 51001 - RNA, 14 nt, Homo sapiens
gcgcucaucccacc

SEQ ID NO: 51002 - RNA, 17 nt, Homo sapiens
gcgcucaucccacccgc

SEQ ID NO: 51003 - RNA, 18 nt, Homo sapiens
gcgcucaucccacccgcc

SEQ ID NO: 51004 - RNA, 19 nt, Homo sapiens
gcgcucaucccacccgccc

SEQ ID NO: 51005 - RNA, 21 nt, Homo sapiens
gcgcucaucccacccgcccac

SEQ ID NO: 51006 - RNA, 18 nt, Homo sapiens
gcgcuccgcgcagcucag

SEQ ID NO: 51007 - RNA, 16 nt, Homo sapiens
gcgcuccucggacggc

SEQ ID NO: 51008 - RNA, 17 nt, Homo sapiens
gcgcuccucggacggcu

SEQ ID NO: 51009 - RNA, 16 nt, Homo sapiens
gcgcucggccugcucg

SEQ ID NO: 51010 - RNA, 23 nt, Homo sapiens
gcgcucggccugcucgcccacuu

SEQ ID NO: 51011 - RNA, 11 nt, Homo sapiens
gcgcugcgcgc

SEQ ID NO: 51012 - RNA, 12 nt, Homo sapiens
gcgcugcgcgcc

SEQ ID NO: 51013 - RNA, 13 nt, Homo sapiens
gcgcugcgcgccg

SEQ ID NO: 51014 - RNA, 15 nt, Homo sapiens
gcgcugcgcgccgcg

SEQ ID NO: 51015 - RNA, 12 nt, Homo sapiens
gcgcuggcugcg

SEQ ID NO: 51016 - RNA, 16 nt, Homo sapiens
gcgcuggcugcgcucg

SEQ ID NO: 51017 - RNA, 17 nt, Homo sapiens
gcggaccuucccagcua

SEQ ID NO: 51018 - RNA, 13 nt, Homo sapiens
gcggcccugugcg

SEQ ID NO: 51019 - RNA, 15 nt, Homo sapiens
gcggcccugugcggc

SEQ ID NO: 51020 - RNA, 17 nt, Homo sapiens
gcggcccugugcggccu

SEQ ID NO: 51021 - RNA, 18 nt, Homo sapiens
gcggcccugugcggccug

SEQ ID NO: 51022 - RNA, 19 nt, Homo sapiens
gcggcccugugcggccugg

SEQ ID NO: 51023 - RNA, 22 nt, Homo sapiens
gcggccuggucuaccuguucgc

SEQ ID NO: 51024 - RNA, 11 nt, Homo sapiens
gcggcggcccu

SEQ ID NO: 51025 - RNA, 12 nt, Homo sapiens
gcggcggcccug

SEQ ID NO: 51026 - RNA, 13 nt, Homo sapiens
gcggcggcccugu

SEQ ID NO: 51027 - RNA, 14 nt, Homo sapiens
gcggcggcccugug

SEQ ID NO: 51028 - RNA, 22 nt, Homo sapiens
gcggcggcccugugcggccugg

SEQ ID NO: 51029 - RNA, 18 nt, Homo sapiens
gcggcgggagggcgcggg

SEQ ID NO: 51030 - RNA, 22 nt, Homo sapiens
gcggcuggaauugaauucccug

SEQ ID NO: 51031 - RNA, 16 nt, Homo sapiens
gcgggacacaggcucc

SEQ ID NO: 51032 - RNA, 14 nt, Homo sapiens
gcgggagggcgcgg

SEQ ID NO: 51033 - RNA, 15 nt, Homo sapiens
gcgggagggcgcggg

SEQ ID NO: 51034 - RNA, 17 nt, Homo sapiens
gcgggagggcgcggggc

SEQ ID NO: 51035 - RNA, 13 nt, Homo sapiens
gcggggagcgagc

SEQ ID NO: 51036 - RNA, 11 nt, Homo sapiens
gcggguccggg

SEQ ID NO: 51037 - RNA, 22 nt, Homo sapiens
gcggguccgggucgcaggacca

SEQ ID NO: 51038 - RNA, 14 nt, Homo sapiens
gcgugagccaccaa

SEQ ID NO: 51039 - RNA, 22 nt, Homo sapiens
gcgugagccaccaaacccggcc

SEQ ID NO: 51040 - RNA, 13 nt, Homo sapiens
gcgugcaggcagc

SEQ ID NO: 51041 - RNA, 19 nt, Homo sapiens
gcgugcaggcagcaggaua

SEQ ID NO: 51042 - RNA, 17 nt, Homo sapiens
gcuaagauauaauuuaa

SEQ ID NO: 51043 - RNA, 20 nt, Homo sapiens
gcuaaguugcaccaacuuug

SEQ ID NO: 51044 - RNA, 15 nt, Homo sapiens
gcuaauuuguguauu

SEQ ID NO: 51045 - RNA, 16 nt, Homo sapiens
gcuacaaaaacacagc

SEQ ID NO: 51046 - RNA, 14 nt, Homo sapiens
gcuaccucuccagc

SEQ ID NO: 51047 - RNA, 15 nt, Homo sapiens
gcuaccucuccagcc

SEQ ID NO: 51048 - RNA, 16 nt, Homo sapiens
gcuaccucuccagccu

SEQ ID NO: 51049 - RNA, 13 nt, Homo sapiens
gcuaccuuuguau

SEQ ID NO: 51050 - RNA, 14 nt, Homo sapiens
gcuacgcgcgcucc

SEQ ID NO: 51051 - RNA, 15 nt, Homo sapiens
gcuacgcgcgcuccg

SEQ ID NO: 51052 - RNA, 17 nt, Homo sapiens
gcuacgcgcgcuccgcg

SEQ ID NO: 51053 - RNA, 18 nt, Homo sapiens
gcuacgcgcgcuccgcgc

SEQ ID NO: 51054 - RNA, 19 nt, Homo sapiens
gcuacgcgcgcuccgcgca

SEQ ID NO: 51055 - RNA, 14 nt, Homo sapiens
gcuacucuguuccu

SEQ ID NO: 51056 - RNA, 20 nt, Homo sapiens
gcuacucuguuccuucacau

SEQ ID NO: 51057 - RNA, 21 nt, Homo sapiens
gcuacucuguuccuucacauc

SEQ ID NO: 51058 - RNA, 14 nt, Homo sapiens
gcuacuuccagggc

SEQ ID NO: 51059 - RNA, 20 nt, Homo sapiens
gcuacuuccagggcuacgcg

SEQ ID NO: 51060 - RNA, 21 nt, Homo sapiens
gcuacuuccagggcuacgcgc

SEQ ID NO: 51061 - RNA, 19 nt, Homo sapiens
gcuagaaaacaggcaaauu

SEQ ID NO: 51062 - RNA, 16 nt, Homo sapiens
gcuagaauucacucca

SEQ ID NO: 51063 - RNA, 13 nt, Homo sapiens
gcuagaauuugau

SEQ ID NO: 51064 - RNA, 14 nt, Homo sapiens
gcuagaauuugaua

SEQ ID NO: 51065 - RNA, 22 nt, Homo sapiens
gcuagaauuugauaugugaaca

SEQ ID NO: 51066 - RNA, 20 nt, Homo sapiens
gcuaggggggucagccagcc

SEQ ID NO: 51067 - RNA, 12 nt, Homo sapiens
gcuaucgccauc

SEQ ID NO: 51068 - RNA, 20 nt, Homo sapiens
gcuaucgccaucacagcuga

SEQ ID NO: 51069 - RNA, 23 nt, Homo sapiens
gcuaucgccaucacagcugaacu

SEQ ID NO: 51070 - RNA, 11 nt, Homo sapiens
gcuaugcauuu

SEQ ID NO: 51071 - RNA, 12 nt, Homo sapiens
gcuaugcauuug

SEQ ID NO: 51072 - RNA, 13 nt, Homo sapiens
gcuaugcauuuga

SEQ ID NO: 51073 - RNA, 15 nt, Homo sapiens
gcuaugcuauugaag

SEQ ID NO: 51074 - RNA, 13 nt, Homo sapiens
gcuauguuguugc

SEQ ID NO: 51075 - RNA, 16 nt, Homo sapiens
gcuauuuaaagacaaa

SEQ ID NO: 51076 - RNA, 23 nt, Homo sapiens
gcucacgccuguaaucccagcac

SEQ ID NO: 51077 - RNA, 12 nt, Homo sapiens
gcucaggcuggc

SEQ ID NO: 51078 - RNA, 13 nt, Homo sapiens
gcucaggcuggca

SEQ ID NO: 51079 - RNA, 15 nt, Homo sapiens
gcucaggcuggcacc

SEQ ID NO: 51080 - RNA, 20 nt, Homo sapiens
gcucaggcuggcaccgcugu

SEQ ID NO: 51081 - RNA, 23 nt, Homo sapiens
gcucaggcuggcaccgcuguacg

SEQ ID NO: 51082 - RNA, 15 nt, Homo sapiens
gcucaucccacccgc

SEQ ID NO: 51083 - RNA, 16 nt, Homo sapiens
gcucaucccacccgcc

SEQ ID NO: 51084 - RNA, 17 nt, Homo sapiens
gcucaucccacccgccc

SEQ ID NO: 51085 - RNA, 18 nt, Homo sapiens
gcucaucccacccgccca

SEQ ID NO: 51086 - RNA, 19 nt, Homo sapiens
gcucaucccacccgcccac

SEQ ID NO: 51087 - RNA, 14 nt, Homo sapiens
gcucauggaauugg

SEQ ID NO: 51088 - RNA, 15 nt, Homo sapiens
gcucauggaauugga

SEQ ID NO: 51089 - RNA, 19 nt, Homo sapiens
gcucauggaauuggagcuc

SEQ ID NO: 51090 - RNA, 21 nt, Homo sapiens
gcucauggaauuggagcucgu

SEQ ID NO: 51091 - RNA, 19 nt, Homo sapiens
gcucccuggaagagaucaa

SEQ ID NO: 51092 - RNA, 13 nt, Homo sapiens
gcuccgcgcagcu

SEQ ID NO: 51093 - RNA, 18 nt, Homo sapiens
gcuccgcgcagcucaggc

SEQ ID NO: 51094 - RNA, 20 nt, Homo sapiens
gcuccgcgcagcucaggcug

SEQ ID NO: 51095 - RNA, 16 nt, Homo sapiens
gcuccggacgcugcug

SEQ ID NO: 51096 - RNA, 17 nt, Homo sapiens
gcuccggacgcugcugc

SEQ ID NO: 51097 - RNA, 18 nt, Homo sapiens
gcuccggacgcugcugcc

SEQ ID NO: 51098 - RNA, 19 nt, Homo sapiens
gcuccggacgcugcugccg

SEQ ID NO: 51099 - RNA, 22 nt, Homo sapiens
gcuccggacgcugcugccgugg

SEQ ID NO: 51100 - RNA, 24 nt, Homo sapiens
gcuccggacgcugcugccgugggc

SEQ ID NO: 51101 - RNA, 16 nt, Homo sapiens
gcuccucggacggcuc

SEQ ID NO: 51102 - RNA, 17 nt, Homo sapiens
gcuccucggacggcucc

SEQ ID NO: 51103 - RNA, 18 nt, Homo sapiens
gcuccucggacggcuccg

SEQ ID NO: 51104 - RNA, 20 nt, Homo sapiens
gcuccucggacggcuccgga

SEQ ID NO: 51105 - RNA, 17 nt, Homo sapiens
gcuccugagacacaugg

SEQ ID NO: 51106 - RNA, 16 nt, Homo sapiens
gcucgcccacuuccuc

SEQ ID NO: 51107 - RNA, 18 nt, Homo sapiens
gcucgcccacuuccuccc

SEQ ID NO: 51108 - RNA, 19 nt, Homo sapiens
gcucgcccacuuccucccg

SEQ ID NO: 51109 - RNA, 14 nt, Homo sapiens
gcucgcuuccgcau

SEQ ID NO: 51110 - RNA, 16 nt, Homo sapiens
gcucgcuuccgcaucc

SEQ ID NO: 51111 - RNA, 11 nt, Homo sapiens
gcucggccugc

SEQ ID NO: 51112 - RNA, 12 nt, Homo sapiens
gcucggccugcu

SEQ ID NO: 51113 - RNA, 14 nt, Homo sapiens
gcucggccugcucg

SEQ ID NO: 51114 - RNA, 16 nt, Homo sapiens
gcucggccugcucgcc

SEQ ID NO: 51115 - RNA, 18 nt, Homo sapiens
gcucggccugcucgccca

SEQ ID NO: 51116 - RNA, 20 nt, Homo sapiens
gcucggccugcucgcccacu

SEQ ID NO: 51117 - RNA, 17 nt, Homo sapiens
gcucuccaaaccacuuu

SEQ ID NO: 51118 - RNA, 18 nt, Homo sapiens
gcucuccaaaccacuuuu

SEQ ID NO: 51119 - RNA, 19 nt, Homo sapiens
gcucuccaaaccacuuuuu

SEQ ID NO: 51120 - RNA, 22 nt, Homo sapiens
gcucucugaccuccuccuucau

SEQ ID NO: 51121 - RNA, 15 nt, Homo sapiens
gcucuggaaaccaca

SEQ ID NO: 51122 - RNA, 13 nt, Homo sapiens
gcucugggucgcc

SEQ ID NO: 51123 - RNA, 14 nt, Homo sapiens
gcucugggucgccg

SEQ ID NO: 51124 - RNA, 16 nt, Homo sapiens
gcucugggucgccggc

SEQ ID NO: 51125 - RNA, 18 nt, Homo sapiens
gcucugggucgccggcau

SEQ ID NO: 51126 - RNA, 23 nt, Homo sapiens
gcugaaccguuugugauugccau

SEQ ID NO: 51127 - RNA, 24 nt, Homo sapiens
gcugaaccguuugugauugccauu

SEQ ID NO: 51128 - RNA, 23 nt, Homo sapiens
gcugagcagauguaauagaaaua

SEQ ID NO: 51129 - RNA, 19 nt, Homo sapiens
gcugagcagucagaagacc

SEQ ID NO: 51130 - RNA, 12 nt, Homo sapiens
gcugaggcgggu

SEQ ID NO: 51131 - RNA, 15 nt, Homo sapiens
gcugaggcgggugga

SEQ ID NO: 51132 - RNA, 22 nt, Homo sapiens
gcugaguguuucacaccuuauc

SEQ ID NO: 51133 - RNA, 18 nt, Homo sapiens
gcugauaucaugccccug

SEQ ID NO: 51134 - RNA, 14 nt, Homo sapiens
gcugcaccugugcc

SEQ ID NO: 51135 - RNA, 12 nt, Homo sapiens
gcugcauuuaaa

SEQ ID NO: 51136 - RNA, 12 nt, Homo sapiens
gcugccccgggg

SEQ ID NO: 51137 - RNA, 13 nt, Homo sapiens
gcugccccgggga

SEQ ID NO: 51138 - RNA, 14 nt, Homo sapiens
gcugccccggggag

SEQ ID NO: 51139 - RNA, 19 nt, Homo sapiens
gcugccccggggaggggcg

SEQ ID NO: 51140 - RNA, 22 nt, Homo sapiens
gcugccccggggaggggcgcuc

SEQ ID NO: 51141 - RNA, 15 nt, Homo sapiens
gcugccgugggccug

SEQ ID NO: 51142 - RNA, 16 nt, Homo sapiens
gcugccgugggccuga

SEQ ID NO: 51143 - RNA, 18 nt, Homo sapiens
gcugccgugggccugaga

SEQ ID NO: 51144 - RNA, 22 nt, Homo sapiens
gcugccgugggccugagaccaa

SEQ ID NO: 51145 - RNA, 22 nt, Homo sapiens
gcugccucuaaaaggccugucc

SEQ ID NO: 51146 - RNA, 10 nt, Homo sapiens
gcugcgcgcc

SEQ ID NO: 51147 - RNA, 12 nt, Homo sapiens
gcugcgcgccgc

SEQ ID NO: 51148 - RNA, 14 nt, Homo sapiens
gcugcgcgccgcgc

SEQ ID NO: 51149 - RNA, 15 nt, Homo sapiens
gcugcgcgccgcgcu

SEQ ID NO: 51150 - RNA, 16 nt, Homo sapiens
gcugcgcgccgcgcuc

SEQ ID NO: 51151 - RNA, 20 nt, Homo sapiens
gcugcgcgccgcgcuccucg

SEQ ID NO: 51152 - RNA, 11 nt, Homo sapiens
gcugcgcucgg

SEQ ID NO: 51153 - RNA, 12 nt, Homo sapiens
gcugcgcucggc

SEQ ID NO: 51154 - RNA, 14 nt, Homo sapiens
gcugcgcucggccu

SEQ ID NO: 51155 - RNA, 15 nt, Homo sapiens
gcugcgcucggccug

SEQ ID NO: 51156 - RNA, 17 nt, Homo sapiens
gcugcgcucggccugcu

SEQ ID NO: 51157 - RNA, 19 nt, Homo sapiens
gcugcgcucggccugcucg

SEQ ID NO: 51158 - RNA, 20 nt, Homo sapiens
gcugcgcucggccugcucgc

SEQ ID NO: 51159 - RNA, 14 nt, Homo sapiens
gcugcucugugguc

SEQ ID NO: 51160 - RNA, 12 nt, Homo sapiens
gcugcugccugc

SEQ ID NO: 51161 - RNA, 13 nt, Homo sapiens
gcugcugguggcg

SEQ ID NO: 51162 - RNA, 14 nt, Homo sapiens
gcugcugguggcgc

SEQ ID NO: 51163 - RNA, 17 nt, Homo sapiens
gcugcugguggcgcugg

SEQ ID NO: 51164 - RNA, 18 nt, Homo sapiens
gcugcugguggcgcuggc

SEQ ID NO: 51165 - RNA, 20 nt, Homo sapiens
gcugcugguggcgcuggcug

SEQ ID NO: 51166 - RNA, 23 nt, Homo sapiens
gcugcugguggcgcuggcugcgc

SEQ ID NO: 51167 - RNA, 15 nt, Homo sapiens
gcuggagcucugccc

SEQ ID NO: 51168 - RNA, 18 nt, Homo sapiens
gcuggagcucugcccauc

SEQ ID NO: 51169 - RNA, 19 nt, Homo sapiens
gcuggagcugccucucuca

SEQ ID NO: 51170 - RNA, 19 nt, Homo sapiens
gcuggagugcaguggcgca

SEQ ID NO: 51171 - RNA, 19 nt, Homo sapiens
gcuggauguggagggggcg

SEQ ID NO: 51172 - RNA, 22 nt, Homo sapiens
gcuggcaccgcuguacgcgagc

SEQ ID NO: 51173 - RNA, 23 nt, Homo sapiens
gcuggcaccgcuguacgcgagcg

SEQ ID NO: 51174 - RNA, 24 nt, Homo sapiens
gcuggcaccgcuguacgcgagcgc

SEQ ID NO: 51175 - RNA, 14 nt, Homo sapiens
gcuggccaggcugg

SEQ ID NO: 51176 - RNA, 14 nt, Homo sapiens
gcuggcugcgcucg

SEQ ID NO: 51177 - RNA, 21 nt, Homo sapiens
gcuggcugcgcucggccugcu

SEQ ID NO: 51178 - RNA, 22 nt, Homo sapiens
gcuggcugcgcucggccugcuc

SEQ ID NO: 51179 - RNA, 20 nt, Homo sapiens
gcugggaauuacaggcguga

SEQ ID NO: 51180 - RNA, 23 nt, Homo sapiens
gcugggaauuacaggcgugagcc

SEQ ID NO: 51181 - RNA, 24 nt, Homo sapiens
gcugggaauuacaggcgugagcca

SEQ ID NO: 51182 - RNA, 14 nt, Homo sapiens
gcugggaguggcau

SEQ ID NO: 51183 - RNA, 23 nt, Homo sapiens
gcugggccuggauggcugccuca

SEQ ID NO: 51184 - RNA, 19 nt, Homo sapiens
gcuggucucgaacugcugg

SEQ ID NO: 51185 - RNA, 15 nt, Homo sapiens
gcugguggcgcuggc

SEQ ID NO: 51186 - RNA, 17 nt, Homo sapiens
gcugguggcgcuggcug

SEQ ID NO: 51187 - RNA, 19 nt, Homo sapiens
gcugguggcgcuggcugcg

SEQ ID NO: 51188 - RNA, 13 nt, Homo sapiens
gcuguacgcgagc

SEQ ID NO: 51189 - RNA, 14 nt, Homo sapiens
gcuguacgcgagcg

SEQ ID NO: 51190 - RNA, 18 nt, Homo sapiens
gcuguacgcgagcgcgcg

SEQ ID NO: 51191 - RNA, 22 nt, Homo sapiens
gcuguacgcgagcgcgcgcgcc

SEQ ID NO: 51192 - RNA, 14 nt, Homo sapiens
gcuguagaagaugg

SEQ ID NO: 51193 - RNA, 12 nt, Homo sapiens
gcuguauucuuc

SEQ ID NO: 51194 - RNA, 21 nt, Homo sapiens
gcuguauuuuaaaagaaugau

SEQ ID NO: 51195 - RNA, 19 nt, Homo sapiens
gcugucuacacuaagagag

SEQ ID NO: 51196 - RNA, 14 nt, Homo sapiens
gcuguggccagcuu

SEQ ID NO: 51197 - RNA, 18 nt, Homo sapiens
gcuguuaaucuuucaaag

SEQ ID NO: 51198 - RNA, 20 nt, Homo sapiens
gcuguuauuuuaucugcuau

SEQ ID NO: 51199 - RNA, 12 nt, Homo sapiens
gcuguuccucgc

SEQ ID NO: 51200 - RNA, 22 nt, Homo sapiens
gcuguuccucgccacgcucugg

SEQ ID NO: 51201 - RNA, 20 nt, Homo sapiens
gcuguuuccauagggugaca

SEQ ID NO: 51202 - RNA, 19 nt, Homo sapiens
gcuguuuuuauauauguga

SEQ ID NO: 51203 - RNA, 14 nt, Homo sapiens
gcuuagacccucau

SEQ ID NO: 51204 - RNA, 15 nt, Homo sapiens
gcuuagacccucaug

SEQ ID NO: 51205 - RNA, 21 nt, Homo sapiens
gcuuagacccucaugcugcca

SEQ ID NO: 51206 - RNA, 22 nt, Homo sapiens
gcuuagacccucaugcugccaa

SEQ ID NO: 51207 - RNA, 14 nt, Homo sapiens
gcuuccaaauauug

SEQ ID NO: 51208 - RNA, 12 nt, Homo sapiens
gcuuccuaacug

SEQ ID NO: 51209 - RNA, 14 nt, Homo sapiens
gcuuccuaacugcu

SEQ ID NO: 51210 - RNA, 17 nt, Homo sapiens
gcuucugggcagacucu

SEQ ID NO: 51211 - RNA, 18 nt, Homo sapiens
gcuugaaauagugucuga

SEQ ID NO: 51212 - RNA, 22 nt, Homo sapiens
gcuugaaauagugucugaugaa

SEQ ID NO: 51213 - RNA, 13 nt, Homo sapiens
gcuugaacccagg

SEQ ID NO: 51214 - RNA, 14 nt, Homo sapiens
gcuugaacccagga

SEQ ID NO: 51215 - RNA, 19 nt, Homo sapiens
gcuugaggacuugggcggg

SEQ ID NO: 51216 - RNA, 21 nt, Homo sapiens
gcuugcccuguuaaaagauga

SEQ ID NO: 51217 - RNA, 19 nt, Homo sapiens
gcuuggcccaggaguuugg

SEQ ID NO: 51218 - RNA, 20 nt, Homo sapiens
gcuuguauuuuacuuuucca

SEQ ID NO: 51219 - RNA, 14 nt, Homo sapiens
gcuuuaauaucauc

SEQ ID NO: 51220 - RNA, 22 nt, Homo sapiens
gcuuucauaacaucgaaaaguu

SEQ ID NO: 51221 - RNA, 15 nt, Homo sapiens
gcuuucccaacagcu

SEQ ID NO: 51222 - RNA, 19 nt, Homo sapiens
gcuuuccguggcacugcau

SEQ ID NO: 51223 - RNA, 21 nt, Homo sapiens
gcuuuccucaaaacuucagac

SEQ ID NO: 51224 - RNA, 23 nt, Homo sapiens
gcuuucuagcuguugagcuguuu

SEQ ID NO: 51225 - RNA, 12 nt, Homo sapiens
gcuuuugauaau

SEQ ID NO: 51226 - RNA, 15 nt, Homo sapiens
gcuuuugugcauuau

SEQ ID NO: 51227 - RNA, 22 nt, Homo sapiens
ggaaaaaacaccaggauuuaag

SEQ ID NO: 51228 - RNA, 19 nt, Homo sapiens
ggaaacuccacauccugug

SEQ ID NO: 51229 - RNA, 15 nt, Homo sapiens
ggaaagaagagccgg

SEQ ID NO: 51230 - RNA, 12 nt, Homo sapiens
ggaaaggcagcu

SEQ ID NO: 51231 - RNA, 14 nt, Homo sapiens
ggaaagggucuccc

SEQ ID NO: 51232 - RNA, 15 nt, Homo sapiens
ggaaagggucucccu

SEQ ID NO: 51233 - RNA, 14 nt, Homo sapiens
ggaaauacacuguu

SEQ ID NO: 51234 - RNA, 20 nt, Homo sapiens
ggaaauauuuuaauguuucu

SEQ ID NO: 51235 - RNA, 19 nt, Homo sapiens
ggaaauguaugugugucua

SEQ ID NO: 51236 - RNA, 14 nt, Homo sapiens
ggaacagaagagga

SEQ ID NO: 51237 - RNA, 16 nt, Homo sapiens
ggaacaugagccuuug

SEQ ID NO: 51238 - RNA, 23 nt, Homo sapiens
ggaacaugagccuuuguugcuau

SEQ ID NO: 51239 - RNA, 18 nt, Homo sapiens
ggaagccucuauugccau

SEQ ID NO: 51240 - RNA, 16 nt, Homo sapiens
ggaauauauaaccagu

SEQ ID NO: 51241 - RNA, 22 nt, Homo sapiens
ggaauauuugcaagacauagaa

SEQ ID NO: 51242 - RNA, 22 nt, Homo sapiens
ggaaucacuggcuguuaaucuu

SEQ ID NO: 51243 - RNA, 17 nt, Homo sapiens
ggaaugaaguacucaua

SEQ ID NO: 51244 - RNA, 21 nt, Homo sapiens
ggaauuacaggcgugagccac

SEQ ID NO: 51245 - RNA, 15 nt, Homo sapiens
ggaauugaggacacu

SEQ ID NO: 51246 - RNA, 16 nt, Homo sapiens
ggaauuggagcucgug

SEQ ID NO: 51247 - RNA, 17 nt, Homo sapiens
ggaauuggagcucgugg

SEQ ID NO: 51248 - RNA, 15 nt, Homo sapiens
ggaauuuucuuccaa

SEQ ID NO: 51249 - RNA, 16 nt, Homo sapiens
ggacaaaaacaaacaa

SEQ ID NO: 51250 - RNA, 16 nt, Homo sapiens
ggacacaggcuccaaa

SEQ ID NO: 51251 - RNA, 17 nt, Homo sapiens
ggacagucaccucaugg

SEQ ID NO: 51252 - RNA, 18 nt, Homo sapiens
ggacagucaccucaugga

SEQ ID NO: 51253 - RNA, 16 nt, Homo sapiens
ggacaguuccugagac

SEQ ID NO: 51254 - RNA, 24 nt, Homo sapiens
ggacaguuccugagaccagccaac

SEQ ID NO: 51255 - RNA, 10 nt, Homo sapiens
ggacaugggc

SEQ ID NO: 51256 - RNA, 15 nt, Homo sapiens
ggacauuugcucaug

SEQ ID NO: 51257 - RNA, 17 nt, Homo sapiens
ggacauuugcucaugga

SEQ ID NO: 51258 - RNA, 14 nt, Homo sapiens
ggaccaucccggcc

SEQ ID NO: 51259 - RNA, 15 nt, Homo sapiens
ggaccaucccggccg

SEQ ID NO: 51260 - RNA, 18 nt, Homo sapiens
ggaccaucccggccggcg

SEQ ID NO: 51261 - RNA, 19 nt, Homo sapiens
ggaccaucccggccggcgc

SEQ ID NO: 51262 - RNA, 15 nt, Homo sapiens
ggaccucuccaugau

SEQ ID NO: 51263 - RNA, 11 nt, Homo sapiens
ggaccugcugu

SEQ ID NO: 51264 - RNA, 14 nt, Homo sapiens
ggacgcugcugccg

SEQ ID NO: 51265 - RNA, 19 nt, Homo sapiens
ggacgcugcugccgugggc

SEQ ID NO: 51266 - RNA, 11 nt, Homo sapiens
ggacggcuccg

SEQ ID NO: 51267 - RNA, 14 nt, Homo sapiens
ggacggcuccggac

SEQ ID NO: 51268 - RNA, 20 nt, Homo sapiens
ggacggcuccggacgcugcu

SEQ ID NO: 51269 - RNA, 13 nt, Homo sapiens
ggacuuccauuug

SEQ ID NO: 51270 - RNA, 14 nt, Homo sapiens
ggacuugggcggga

SEQ ID NO: 51271 - RNA, 24 nt, Homo sapiens
ggacuugggcgggacacaggcucc

SEQ ID NO: 51272 - RNA, 13 nt, Homo sapiens
ggagaaacuggaa

SEQ ID NO: 51273 - RNA, 10 nt, Homo sapiens
ggagaagaac

SEQ ID NO: 51274 - RNA, 11 nt, Homo sapiens
ggagaagaacu

SEQ ID NO: 51275 - RNA, 15 nt, Homo sapiens
ggagaaucacuugaa

SEQ ID NO: 51276 - RNA, 16 nt, Homo sapiens
ggagaaucacuugaac

SEQ ID NO: 51277 - RNA, 14 nt, Homo sapiens
ggagacaccaccac

SEQ ID NO: 51278 - RNA, 15 nt, Homo sapiens
ggagacaccaccacc

SEQ ID NO: 51279 - RNA, 16 nt, Homo sapiens
ggagacaccaccaccc

SEQ ID NO: 51280 - RNA, 17 nt, Homo sapiens
ggagacaccaccacccu

SEQ ID NO: 51281 - RNA, 18 nt, Homo sapiens
ggagagaagauagcaggg

SEQ ID NO: 51282 - RNA, 17 nt, Homo sapiens
ggagccgggaaagaaga

SEQ ID NO: 51283 - RNA, 21 nt, Homo sapiens
ggagccgggaaagaagagccg

SEQ ID NO: 51284 - RNA, 13 nt, Homo sapiens
ggagccuccagcu

SEQ ID NO: 51285 - RNA, 16 nt, Homo sapiens
ggagccuccagcugcc

SEQ ID NO: 51286 - RNA, 18 nt, Homo sapiens
ggagccuccagcugcccc

SEQ ID NO: 51287 - RNA, 23 nt, Homo sapiens
ggagccugcaacaugccagccac

SEQ ID NO: 51288 - RNA, 19 nt, Homo sapiens
ggagcgagccccaggcggg

SEQ ID NO: 51289 - RNA, 16 nt, Homo sapiens
ggagcuagaauuugau

SEQ ID NO: 51290 - RNA, 12 nt, Homo sapiens
ggagcucgugga

SEQ ID NO: 51291 - RNA, 12 nt, Homo sapiens
ggagcucguggg

SEQ ID NO: 51292 - RNA, 21 nt, Homo sapiens
ggagcucugcccauccugccc

SEQ ID NO: 51293 - RNA, 10 nt, Homo sapiens
ggagcugccu

SEQ ID NO: 51294 - RNA, 12 nt, Homo sapiens
ggagcugccucu

SEQ ID NO: 51295 - RNA, 22 nt, Homo sapiens
ggagcugccucucucauccacu

SEQ ID NO: 51296 - RNA, 21 nt, Homo sapiens
ggagcuugaaauagugucuga

SEQ ID NO: 51297 - RNA, 20 nt, Homo sapiens
ggaggcagagguugcaguga

SEQ ID NO: 51298 - RNA, 15 nt, Homo sapiens
ggaggcugaggcaag

SEQ ID NO: 51299 - RNA, 13 nt, Homo sapiens
ggaggggcgcucg

SEQ ID NO: 51300 - RNA, 16 nt, Homo sapiens
ggaguaccauaauucu

SEQ ID NO: 51301 - RNA, 17 nt, Homo sapiens
ggaguaccauaauucug

SEQ ID NO: 51302 - RNA, 18 nt, Homo sapiens
ggaguaccauaauucugg

SEQ ID NO: 51303 - RNA, 18 nt, Homo sapiens
ggaguuaggcuauucaca

SEQ ID NO: 51304 - RNA, 20 nt, Homo sapiens
ggaguuaggcuauucacaac

SEQ ID NO: 51305 - RNA, 20 nt, Homo sapiens
ggaguuccuaaccagccugg

SEQ ID NO: 51306 - RNA, 15 nt, Homo sapiens
ggaguuuggccagaa

SEQ ID NO: 51307 - RNA, 21 nt, Homo sapiens
ggaguuuggccagaagucaag

SEQ ID NO: 51308 - RNA, 15 nt, Homo sapiens
ggauacuauuuaauu

SEQ ID NO: 51309 - RNA, 19 nt, Homo sapiens
ggauagcugacccagcccc

SEQ ID NO: 51310 - RNA, 12 nt, Homo sapiens
ggauaugagaug

SEQ ID NO: 51311 - RNA, 16 nt, Homo sapiens
ggauaugagauguagc

SEQ ID NO: 51312 - RNA, 15 nt, Homo sapiens
ggaucucacaagcac

SEQ ID NO: 51313 - RNA, 17 nt, Homo sapiens
ggaucucacaagcacuu

SEQ ID NO: 51314 - RNA, 12 nt, Homo sapiens
ggaugcccacgg

SEQ ID NO: 51315 - RNA, 15 nt, Homo sapiens
ggaugcuuguacaua

SEQ ID NO: 51316 - RNA, 16 nt, Homo sapiens
ggauuuaacagaaaug

SEQ ID NO: 51317 - RNA, 22 nt, Homo sapiens
ggauuuaacagaaauguacagc

SEQ ID NO: 51318 - RNA, 12 nt, Homo sapiens
ggauuugcaacc

SEQ ID NO: 51319 - RNA, 13 nt, Homo sapiens
ggauuugcaaccc

SEQ ID NO: 51320 - RNA, 16 nt, Homo sapiens
ggcaagggaccugcuu

SEQ ID NO: 51321 - RNA, 21 nt, Homo sapiens
ggcaauguucccccucuccuc

SEQ ID NO: 51322 - RNA, 15 nt, Homo sapiens
ggcaccgcuguacgc

SEQ ID NO: 51323 - RNA, 16 nt, Homo sapiens
ggcaccgcuguacgcg

SEQ ID NO: 51324 - RNA, 21 nt, Homo sapiens
ggcaccgcuguacgcgagcgc

SEQ ID NO: 51325 - RNA, 14 nt, Homo sapiens
ggcacuugggacaa

SEQ ID NO: 51326 - RNA, 21 nt, Homo sapiens
ggcagagguugcagugagccg

SEQ ID NO: 51327 - RNA, 19 nt, Homo sapiens
ggcagcaggauagaguggg

SEQ ID NO: 51328 - RNA, 18 nt, Homo sapiens
ggcagcuuuccucaaaac

SEQ ID NO: 51329 - RNA, 17 nt, Homo sapiens
ggcaggaccuguggcca

SEQ ID NO: 51330 - RNA, 15 nt, Homo sapiens
ggcaggcaucgccau

SEQ ID NO: 51331 - RNA, 16 nt, Homo sapiens
ggcaggcaucgccauu

SEQ ID NO: 51332 - RNA, 13 nt, Homo sapiens
ggcagggacagga

SEQ ID NO: 51333 - RNA, 20 nt, Homo sapiens
ggcaggucacacaaccuguc

SEQ ID NO: 51334 - RNA, 14 nt, Homo sapiens
ggcagugcuuggcc

SEQ ID NO: 51335 - RNA, 15 nt, Homo sapiens
ggcagugcuuggccc

SEQ ID NO: 51336 - RNA, 18 nt, Homo sapiens
ggcagugcuuggcccagg

SEQ ID NO: 51337 - RNA, 19 nt, Homo sapiens
ggcagugcuuggcccagga

SEQ ID NO: 51338 - RNA, 21 nt, Homo sapiens
ggcagugcuuggcccaggagu

SEQ ID NO: 51339 - RNA, 20 nt, Homo sapiens
ggcaguggugguuuucuguu

SEQ ID NO: 51340 - RNA, 21 nt, Homo sapiens
ggcauacugccuuguuuaaug

SEQ ID NO: 51341 - RNA, 19 nt, Homo sapiens
ggcauauuuaacaaaauuu

SEQ ID NO: 51342 - RNA, 20 nt, Homo sapiens
ggcauauuuaacaaaauuug

SEQ ID NO: 51343 - RNA, 10 nt, Homo sapiens
ggcaucaugc

SEQ ID NO: 51344 - RNA, 15 nt, Homo sapiens
ggccagaagucaagg

SEQ ID NO: 51345 - RNA, 16 nt, Homo sapiens
ggccagaagucaaggc

SEQ ID NO: 51346 - RNA, 20 nt, Homo sapiens
ggccagaagucaaggcuuag

SEQ ID NO: 51347 - RNA, 21 nt, Homo sapiens
ggccagugagaucaaugugac

SEQ ID NO: 51348 - RNA, 19 nt, Homo sapiens
ggcccaggaguuuggccag

SEQ ID NO: 51349 - RNA, 20 nt, Homo sapiens
ggcccaggaguuuggccaga

SEQ ID NO: 51350 - RNA, 22 nt, Homo sapiens
ggcccaggaguuuggccagaag

SEQ ID NO: 51351 - RNA, 13 nt, Homo sapiens
ggcccccgggccg

SEQ ID NO: 51352 - RNA, 14 nt, Homo sapiens
ggcccccgggccga

SEQ ID NO: 51353 - RNA, 15 nt, Homo sapiens
ggcccccgggccgac

SEQ ID NO: 51354 - RNA, 20 nt, Homo sapiens
ggcccccgggccgacggagc

SEQ ID NO: 51355 - RNA, 16 nt, Homo sapiens
ggcccugccaugcucu

SEQ ID NO: 51356 - RNA, 19 nt, Homo sapiens
ggcccugccaugcucucca

SEQ ID NO: 51357 - RNA, 14 nt, Homo sapiens
ggcccugugcggcc

SEQ ID NO: 51358 - RNA, 20 nt, Homo sapiens
ggcccugugcggccuggucu

SEQ ID NO: 51359 - RNA, 13 nt, Homo sapiens
ggccgacggagcc

SEQ ID NO: 51360 - RNA, 15 nt, Homo sapiens
ggccgacggagccgg

SEQ ID NO: 51361 - RNA, 18 nt, Homo sapiens
ggccgacggagccgggaa

SEQ ID NO: 51362 - RNA, 19 nt, Homo sapiens
ggccgacggagccgggaaa

SEQ ID NO: 51363 - RNA, 10 nt, Homo sapiens
ggccgcgcug

SEQ ID NO: 51364 - RNA, 11 nt, Homo sapiens
ggccgcgcugc

SEQ ID NO: 51365 - RNA, 12 nt, Homo sapiens
ggccgcgcugcg

SEQ ID NO: 51366 - RNA, 13 nt, Homo sapiens
ggccgcgcugcgc

SEQ ID NO: 51367 - RNA, 16 nt, Homo sapiens
ggccgcgcugcgcgcc

SEQ ID NO: 51368 - RNA, 18 nt, Homo sapiens
ggccgcgcugcgcgccgc

SEQ ID NO: 51369 - RNA, 19 nt, Homo sapiens
ggccgcgcugcgcgccgcg

SEQ ID NO: 51370 - RNA, 13 nt, Homo sapiens
ggccggcgcgcuc

SEQ ID NO: 51371 - RNA, 14 nt, Homo sapiens
ggccggcgcgcuca

SEQ ID NO: 51372 - RNA, 15 nt, Homo sapiens
ggccgggcgcggugg

SEQ ID NO: 51373 - RNA, 20 nt, Homo sapiens
ggccuccucucucaguuuuu

SEQ ID NO: 51374 - RNA, 17 nt, Homo sapiens
ggccugagaccaaggcc

SEQ ID NO: 51375 - RNA, 21 nt, Homo sapiens
ggccugagaccaaggcccccg

SEQ ID NO: 51376 - RNA, 18 nt, Homo sapiens
ggccuggucuaccuguuc

SEQ ID NO: 51377 - RNA, 20 nt, Homo sapiens
ggccuggucuaccuguucgc

SEQ ID NO: 51378 - RNA, 13 nt, Homo sapiens
ggcgacaguuuuc

SEQ ID NO: 51379 - RNA, 20 nt, Homo sapiens
ggcgcgcaccuguaauccca

SEQ ID NO: 51380 - RNA, 14 nt, Homo sapiens
ggcgcgcgccacca

SEQ ID NO: 51381 - RNA, 14 nt, Homo sapiens
ggcgcgcucauccc

SEQ ID NO: 51382 - RNA, 23 nt, Homo sapiens
ggcgcggcgggagggcgcggggc

SEQ ID NO: 51383 - RNA, 11 nt, Homo sapiens
ggcgcggggcg

SEQ ID NO: 51384 - RNA, 12 nt, Homo sapiens
ggcgcggggcgg

SEQ ID NO: 51385 - RNA, 13 nt, Homo sapiens
ggcgcggggcggg

SEQ ID NO: 51386 - RNA, 21 nt, Homo sapiens
ggcgcggggcggggagcgagc

SEQ ID NO: 51387 - RNA, 14 nt, Homo sapiens
ggcgcgguggcuca

SEQ ID NO: 51388 - RNA, 13 nt, Homo sapiens
ggcgcgugcaggc

SEQ ID NO: 51389 - RNA, 13 nt, Homo sapiens
ggcgcucgcuucc

SEQ ID NO: 51390 - RNA, 17 nt, Homo sapiens
ggcgcucgcuuccgcau

SEQ ID NO: 51391 - RNA, 18 nt, Homo sapiens
ggcgcucgcuuccgcauc

SEQ ID NO: 51392 - RNA, 19 nt, Homo sapiens
ggcgcucgcuuccgcaucc

SEQ ID NO: 51393 - RNA, 20 nt, Homo sapiens
ggcgcucgcuuccgcauccu

SEQ ID NO: 51394 - RNA, 12 nt, Homo sapiens
ggcgcuggcugc

SEQ ID NO: 51395 - RNA, 16 nt, Homo sapiens
ggcgcuggcugcgcuc

SEQ ID NO: 51396 - RNA, 17 nt, Homo sapiens
ggcgcuggcugcgcucg

SEQ ID NO: 51397 - RNA, 21 nt, Homo sapiens
ggcgcuggcugcgcucggccu

SEQ ID NO: 51398 - RNA, 21 nt, Homo sapiens
ggcggcccugugcggccuggu

SEQ ID NO: 51399 - RNA, 10 nt, Homo sapiens
ggcggcggcc

SEQ ID NO: 51400 - RNA, 11 nt, Homo sapiens
ggcggcggccc

SEQ ID NO: 51401 - RNA, 21 nt, Homo sapiens
ggcggcggcccugugcggccu

SEQ ID NO: 51402 - RNA, 20 nt, Homo sapiens
ggcggcuggaauugaauucc

SEQ ID NO: 51403 - RNA, 20 nt, Homo sapiens
ggcgggagggcgcggggcgg

SEQ ID NO: 51404 - RNA, 14 nt, Homo sapiens
ggcggggagcgagc

SEQ ID NO: 51405 - RNA, 15 nt, Homo sapiens
ggcggguccgggucg

SEQ ID NO: 51406 - RNA, 18 nt, Homo sapiens
ggcggguccgggucgcag

SEQ ID NO: 51407 - RNA, 19 nt, Homo sapiens
ggcggguccgggucgcagg

SEQ ID NO: 51408 - RNA, 20 nt, Homo sapiens
ggcggguccgggucgcagga

SEQ ID NO: 51409 - RNA, 21 nt, Homo sapiens
ggcggguccgggucgcaggac

SEQ ID NO: 51410 - RNA, 14 nt, Homo sapiens
ggcgugagccacca

SEQ ID NO: 51411 - RNA, 15 nt, Homo sapiens
ggcgugagccaccaa

SEQ ID NO: 51412 - RNA, 16 nt, Homo sapiens
ggcgugagccaccaaa

SEQ ID NO: 51413 - RNA, 17 nt, Homo sapiens
ggcgugagccaccaaac

SEQ ID NO: 51414 - RNA, 12 nt, Homo sapiens
ggcuacgcgcgc

SEQ ID NO: 51415 - RNA, 13 nt, Homo sapiens
ggcuacgcgcgcu

SEQ ID NO: 51416 - RNA, 14 nt, Homo sapiens
ggcuacgcgcgcuc

SEQ ID NO: 51417 - RNA, 16 nt, Homo sapiens
ggcuacgcgcgcuccg

SEQ ID NO: 51418 - RNA, 18 nt, Homo sapiens
ggcuacgcgcgcuccgcg

SEQ ID NO: 51419 - RNA, 22 nt, Homo sapiens
ggcuacgcgcgcuccgcgcagc

SEQ ID NO: 51420 - RNA, 12 nt, Homo sapiens
ggcuacugucag

SEQ ID NO: 51421 - RNA, 10 nt, Homo sapiens
ggcuagaacc

SEQ ID NO: 51422 - RNA, 11 nt, Homo sapiens
ggcuaugcauu

SEQ ID NO: 51423 - RNA, 22 nt, Homo sapiens
ggcuauuuaaagacaaagacaa

SEQ ID NO: 51424 - RNA, 21 nt, Homo sapiens
ggcucacgccuguaaucccag

SEQ ID NO: 51425 - RNA, 22 nt, Homo sapiens
ggcucacgccuguaaucccagc

SEQ ID NO: 51426 - RNA, 14 nt, Homo sapiens
ggcuccggacgcug

SEQ ID NO: 51427 - RNA, 19 nt, Homo sapiens
ggcuccggacgcugcugcc

SEQ ID NO: 51428 - RNA, 23 nt, Homo sapiens
ggcucugggauagcugacccagc

SEQ ID NO: 51429 - RNA, 15 nt, Homo sapiens
ggcugcgcucggccu

SEQ ID NO: 51430 - RNA, 17 nt, Homo sapiens
ggcugcgcucggccugc

SEQ ID NO: 51431 - RNA, 18 nt, Homo sapiens
ggcugcgcucggccugcu

SEQ ID NO: 51432 - RNA, 20 nt, Homo sapiens
ggcugcgcucggccugcucg

SEQ ID NO: 51433 - RNA, 21 nt, Homo sapiens
ggcugcgcucggccugcucgc

SEQ ID NO: 51434 - RNA, 15 nt, Homo sapiens
ggcugcugguggcgc

SEQ ID NO: 51435 - RNA, 19 nt, Homo sapiens
ggcugcugguggcgcuggc

SEQ ID NO: 51436 - RNA, 20 nt, Homo sapiens
ggcugcugguggcgcuggcu

SEQ ID NO: 51437 - RNA, 13 nt, Homo sapiens
ggcuggagcugcc

SEQ ID NO: 51438 - RNA, 17 nt, Homo sapiens
ggcuggagugcaguggc

SEQ ID NO: 51439 - RNA, 21 nt, Homo sapiens
ggcuggagugcaguggcgcaa

SEQ ID NO: 51440 - RNA, 13 nt, Homo sapiens
ggcuggcaccgcu

SEQ ID NO: 51441 - RNA, 14 nt, Homo sapiens
ggcuggcaccgcug

SEQ ID NO: 51442 - RNA, 15 nt, Homo sapiens
ggcuggcaccgcugu

SEQ ID NO: 51443 - RNA, 17 nt, Homo sapiens
ggcuggcaccgcuguac

SEQ ID NO: 51444 - RNA, 15 nt, Homo sapiens
ggcugggaguggcau

SEQ ID NO: 51445 - RNA, 12 nt, Homo sapiens
ggcuggucucga

SEQ ID NO: 51446 - RNA, 16 nt, Homo sapiens
ggcuggucucgaacug

SEQ ID NO: 51447 - RNA, 20 nt, Homo sapiens
ggcuggucucgaacugcugg

SEQ ID NO: 51448 - RNA, 20 nt, Homo sapiens
ggcuuagacccucaugcugc

SEQ ID NO: 51449 - RNA, 22 nt, Homo sapiens
ggcuuagacccucaugcugcca

SEQ ID NO: 51450 - RNA, 23 nt, Homo sapiens
ggcuuagacccucaugcugccaa

SEQ ID NO: 51451 - RNA, 15 nt, Homo sapiens
ggcuuccuggcaaua

SEQ ID NO: 51452 - RNA, 15 nt, Homo sapiens
ggcuugugugcacau

SEQ ID NO: 51453 - RNA, 19 nt, Homo sapiens
ggcuuuaaaacuuauccuc

SEQ ID NO: 51454 - RNA, 15 nt, Homo sapiens
ggcuuuaucucaggg

SEQ ID NO: 51455 - RNA, 15 nt, Homo sapiens
ggcuuucccaacagc

SEQ ID NO: 51456 - RNA, 13 nt, Homo sapiens
ggcuuuugugcau

SEQ ID NO: 51457 - RNA, 10 nt, Homo sapiens
gggaaacugc

SEQ ID NO: 51458 - RNA, 20 nt, Homo sapiens
gggaaagaagagccggagcc

SEQ ID NO: 51459 - RNA, 13 nt, Homo sapiens
gggaaagggcugu

SEQ ID NO: 51460 - RNA, 21 nt, Homo sapiens
gggaaugaagauacugaaaua

SEQ ID NO: 51461 - RNA, 20 nt, Homo sapiens
gggacacaggcuccaaacug

SEQ ID NO: 51462 - RNA, 11 nt, Homo sapiens
gggaccucucc

SEQ ID NO: 51463 - RNA, 18 nt, Homo sapiens
gggacuucugucuucaca

SEQ ID NO: 51464 - RNA, 18 nt, Homo sapiens
gggagaaccuagggugau

SEQ ID NO: 51465 - RNA, 19 nt, Homo sapiens
gggagcgagccccaggcgg

SEQ ID NO: 51466 - RNA, 20 nt, Homo sapiens
gggagcgagccccaggcggg

SEQ ID NO: 51467 - RNA, 14 nt, Homo sapiens
gggagcuuuuguag

SEQ ID NO: 51468 - RNA, 16 nt, Homo sapiens
gggaggggcgcucgcu

SEQ ID NO: 51469 - RNA, 11 nt, Homo sapiens
gggaguggcgc

SEQ ID NO: 51470 - RNA, 12 nt, Homo sapiens
gggaguggcgcg

SEQ ID NO: 51471 - RNA, 17 nt, Homo sapiens
gggaguggcgcgcgcca

SEQ ID NO: 51472 - RNA, 18 nt, Homo sapiens
gggaguggcgcgcgccac

SEQ ID NO: 51473 - RNA, 13 nt, Homo sapiens
gggcagugcuugg

SEQ ID NO: 51474 - RNA, 15 nt, Homo sapiens
gggcagugcuuggcc

SEQ ID NO: 51475 - RNA, 17 nt, Homo sapiens
gggcagugcuuggccca

SEQ ID NO: 51476 - RNA, 18 nt, Homo sapiens
gggcagugcuuggcccag

SEQ ID NO: 51477 - RNA, 19 nt, Homo sapiens
gggcagugcuuggcccagg

SEQ ID NO: 51478 - RNA, 20 nt, Homo sapiens
gggcagugcuuggcccagga

SEQ ID NO: 51479 - RNA, 17 nt, Homo sapiens
gggcauggguuuuauua

SEQ ID NO: 51480 - RNA, 18 nt, Homo sapiens
gggcauggguuuuauuau

SEQ ID NO: 51481 - RNA, 13 nt, Homo sapiens
gggccgacggagc

SEQ ID NO: 51482 - RNA, 19 nt, Homo sapiens
gggccgacggagccgggaa

SEQ ID NO: 51483 - RNA, 13 nt, Homo sapiens
gggccuggcuggg

SEQ ID NO: 51484 - RNA, 20 nt, Homo sapiens
gggccuggcugggaguggca

SEQ ID NO: 51485 - RNA, 12 nt, Homo sapiens
gggcgcggggcg

SEQ ID NO: 51486 - RNA, 13 nt, Homo sapiens
gggcgcggggcgg

SEQ ID NO: 51487 - RNA, 20 nt, Homo sapiens
gggcgcucgcuuccgcaucc

SEQ ID NO: 51488 - RNA, 21 nt, Homo sapiens
gggcgcucgcuuccgcauccu

SEQ ID NO: 51489 - RNA, 23 nt, Homo sapiens
gggcgcucgcuuccgcauccuag

SEQ ID NO: 51490 - RNA, 24 nt, Homo sapiens
gggcgcucgcuuccgcauccuagu

SEQ ID NO: 51491 - RNA, 10 nt, Homo sapiens
gggcggcggc

SEQ ID NO: 51492 - RNA, 11 nt, Homo sapiens
gggcggcggcc

SEQ ID NO: 51493 - RNA, 13 nt, Homo sapiens
gggcggcggcccu

SEQ ID NO: 51494 - RNA, 15 nt, Homo sapiens
gggcgggacacaggc

SEQ ID NO: 51495 - RNA, 16 nt, Homo sapiens
gggcggggagcgagcc

SEQ ID NO: 51496 - RNA, 11 nt, Homo sapiens
gggcuacgcgc

SEQ ID NO: 51497 - RNA, 12 nt, Homo sapiens
gggcuacgcgcg

SEQ ID NO: 51498 - RNA, 16 nt, Homo sapiens
gggcuacgcgcgcucc

SEQ ID NO: 51499 - RNA, 20 nt, Homo sapiens
gggcuacgcgcgcuccgcgc

SEQ ID NO: 51500 - RNA, 17 nt, Homo sapiens
gggcuuuagggaccugc

SEQ ID NO: 51501 - RNA, 13 nt, Homo sapiens
ggggaggggcgcu

SEQ ID NO: 51502 - RNA, 15 nt, Homo sapiens
ggggaggggcgcucg

SEQ ID NO: 51503 - RNA, 21 nt, Homo sapiens
ggggcagugcuuggcccagga

SEQ ID NO: 51504 - RNA, 16 nt, Homo sapiens
ggggccaugaaucacc

SEQ ID NO: 51505 - RNA, 17 nt, Homo sapiens
ggggcgcucgcuuccgc

SEQ ID NO: 51506 - RNA, 10 nt, Homo sapiens
ggggcggcgg

SEQ ID NO: 51507 - RNA, 11 nt, Homo sapiens
ggggcggcggc

SEQ ID NO: 51508 - RNA, 15 nt, Homo sapiens
ggggcggcggcccug

SEQ ID NO: 51509 - RNA, 17 nt, Homo sapiens
ggggcggggagcgagcc

SEQ ID NO: 51510 - RNA, 14 nt, Homo sapiens
ggggcugaugcagu

SEQ ID NO: 51511 - RNA, 15 nt, Homo sapiens
ggggcugaugcaguu

SEQ ID NO: 51512 - RNA, 10 nt, Homo sapiens
ggggcuuccu

SEQ ID NO: 51513 - RNA, 20 nt, Homo sapiens
ggggcuuuagggaccugcug

SEQ ID NO: 51514 - RNA, 16 nt, Homo sapiens
gggguggguggggcag

SEQ ID NO: 51515 - RNA, 19 nt, Homo sapiens
gggguggguggggcagugc

SEQ ID NO: 51516 - RNA, 15 nt, Homo sapiens
ggguaauaagagcag

SEQ ID NO: 51517 - RNA, 22 nt, Homo sapiens
ggguaauaagagcaguagcagc

SEQ ID NO: 51518 - RNA, 20 nt, Homo sapiens
ggguagcauuuguguugaag

SEQ ID NO: 51519 - RNA, 23 nt, Homo sapiens
gggucgcaggaccaucccggccg

SEQ ID NO: 51520 - RNA, 11 nt, Homo sapiens
gggucgccggc

SEQ ID NO: 51521 - RNA, 12 nt, Homo sapiens
gggucgccggca

SEQ ID NO: 51522 - RNA, 15 nt, Homo sapiens
gggucucaguguccu

SEQ ID NO: 51523 - RNA, 11 nt, Homo sapiens
gggugaacugc

SEQ ID NO: 51524 - RNA, 15 nt, Homo sapiens
gggugaacugcagcg

SEQ ID NO: 51525 - RNA, 13 nt, Homo sapiens
gggugagggcuug

SEQ ID NO: 51526 - RNA, 13 nt, Homo sapiens
ggguggggcagug

SEQ ID NO: 51527 - RNA, 13 nt, Homo sapiens
ggguggguggggc

SEQ ID NO: 51528 - RNA, 20 nt, Homo sapiens
gguagcuaaauauauauuuu

SEQ ID NO: 51529 - RNA, 22 nt, Homo sapiens
gguauauaaauuuucccaaaac

SEQ ID NO: 51530 - RNA, 17 nt, Homo sapiens
ggucacuuuacuguccc

SEQ ID NO: 51531 - RNA, 22 nt, Homo sapiens
ggucaggaguuccuaaccagcc

SEQ ID NO: 51532 - RNA, 14 nt, Homo sapiens
gguccgggucgcag

SEQ ID NO: 51533 - RNA, 17 nt, Homo sapiens
gguccgggucgcaggac

SEQ ID NO: 51534 - RNA, 19 nt, Homo sapiens
gguccgggucgcaggacca

SEQ ID NO: 51535 - RNA, 22 nt, Homo sapiens
gguccuaagucccugcugcccu

SEQ ID NO: 51536 - RNA, 23 nt, Homo sapiens
gguccuaagucccugcugcccuu

SEQ ID NO: 51537 - RNA, 13 nt, Homo sapiens
ggucgcaggacca

SEQ ID NO: 51538 - RNA, 20 nt, Homo sapiens
ggucgcaggaccaucccggc

SEQ ID NO: 51539 - RNA, 21 nt, Homo sapiens
ggucgcaggaccaucccggcc

SEQ ID NO: 51540 - RNA, 11 nt, Homo sapiens
ggucgccggca

SEQ ID NO: 51541 - RNA, 16 nt, Homo sapiens
ggucgccggcaucuuc

SEQ ID NO: 51542 - RNA, 12 nt, Homo sapiens
ggucggguuuua

SEQ ID NO: 51543 - RNA, 19 nt, Homo sapiens
ggucuaccuguucgcgcgc

SEQ ID NO: 51544 - RNA, 20 nt, Homo sapiens
ggucuaccuguucgcgcgcc

SEQ ID NO: 51545 - RNA, 21 nt, Homo sapiens
ggucuaccuguucgcgcgccu

SEQ ID NO: 51546 - RNA, 23 nt, Homo sapiens
ggucuaccuguucgcgcgccucc

SEQ ID NO: 51547 - RNA, 16 nt, Homo sapiens
ggucucaguguccuca

SEQ ID NO: 51548 - RNA, 14 nt, Homo sapiens
ggucucgaacugcu

SEQ ID NO: 51549 - RNA, 16 nt, Homo sapiens
ggucucgaacugcugg

SEQ ID NO: 51550 - RNA, 17 nt, Homo sapiens
ggucucgaacugcugga

SEQ ID NO: 51551 - RNA, 18 nt, Homo sapiens
ggucucgaacugcuggau

SEQ ID NO: 51552 - RNA, 14 nt, Homo sapiens
ggugacagagcaag

SEQ ID NO: 51553 - RNA, 22 nt, Homo sapiens
ggugacccugaugaaaacauag

SEQ ID NO: 51554 - RNA, 24 nt, Homo sapiens
ggugaucucauuuaauccucucaa

SEQ ID NO: 51555 - RNA, 12 nt, Homo sapiens
gguggcgcuggc

SEQ ID NO: 51556 - RNA, 13 nt, Homo sapiens
gguggcgcuggcu

SEQ ID NO: 51557 - RNA, 14 nt, Homo sapiens
gguggcgcuggcug

SEQ ID NO: 51558 - RNA, 15 nt, Homo sapiens
gguggcgcuggcugc

SEQ ID NO: 51559 - RNA, 19 nt, Homo sapiens
gguggcgcuggcugcgcuc

SEQ ID NO: 51560 - RNA, 20 nt, Homo sapiens
gguggcgcuggcugcgcucg

SEQ ID NO: 51561 - RNA, 22 nt, Homo sapiens
gguggcgcuggcugcgcucggc

SEQ ID NO: 51562 - RNA, 15 nt, Homo sapiens
gguggcucacgccug

SEQ ID NO: 51563 - RNA, 16 nt, Homo sapiens
gguggcucacgccugu

SEQ ID NO: 51564 - RNA, 22 nt, Homo sapiens
gguggcuguuccugaaggaggc

SEQ ID NO: 51565 - RNA, 17 nt, Homo sapiens
gguggggcagugcuugg

SEQ ID NO: 51566 - RNA, 14 nt, Homo sapiens
ggugggugggguga

SEQ ID NO: 51567 - RNA, 16 nt, Homo sapiens
ggugguuucagaaaug

SEQ ID NO: 51568 - RNA, 15 nt, Homo sapiens
gguucuaggccgggc

SEQ ID NO: 51569 - RNA, 16 nt, Homo sapiens
gguucuaggccgggcg

SEQ ID NO: 51570 - RNA, 17 nt, Homo sapiens
gguucuaggccgggcgc

SEQ ID NO: 51571 - RNA, 15 nt, Homo sapiens
gguugcagugagccg

SEQ ID NO: 51572 - RNA, 19 nt, Homo sapiens
gguugcuuuaauaucauca

SEQ ID NO: 51573 - RNA, 15 nt, Homo sapiens
gguuugccaugcugg

SEQ ID NO: 51574 - RNA, 16 nt, Homo sapiens
gguuugccaugcuggc

SEQ ID NO: 51575 - RNA, 19 nt, Homo sapiens
gguuuuucaguuuucagga

SEQ ID NO: 51576 - RNA, 18 nt, Homo sapiens
guaaaauggugugaccac

SEQ ID NO: 51577 - RNA, 21 nt, Homo sapiens
guaaaauugaaaggcauucuc

SEQ ID NO: 51578 - RNA, 23 nt, Homo sapiens
guaaaauugaaaggcauucucug

SEQ ID NO: 51579 - RNA, 15 nt, Homo sapiens
guaaacggucucuca

SEQ ID NO: 51580 - RNA, 17 nt, Homo sapiens
guaaacggucucucacu

SEQ ID NO: 51581 - RNA, 17 nt, Homo sapiens
guaaagcuuugugcaga

SEQ ID NO: 51582 - RNA, 13 nt, Homo sapiens
guaaaggcaaacu

SEQ ID NO: 51583 - RNA, 14 nt, Homo sapiens
guaaaggcaaacuu

SEQ ID NO: 51584 - RNA, 16 nt, Homo sapiens
guaaauagcuaagaua

SEQ ID NO: 51585 - RNA, 19 nt, Homo sapiens
guaaauagcuaagauauaa

SEQ ID NO: 51586 - RNA, 21 nt, Homo sapiens
guaaaugggggugcauuugag

SEQ ID NO: 51587 - RNA, 22 nt, Homo sapiens
guaacaacaauuauuugaagau

SEQ ID NO: 51588 - RNA, 15 nt, Homo sapiens
guaacugacaacuug

SEQ ID NO: 51589 - RNA, 21 nt, Homo sapiens
guaacuguaaagaugaauguc

SEQ ID NO: 51590 - RNA, 23 nt, Homo sapiens
guaacuguaaagaugaaugucag

SEQ ID NO: 51591 - RNA, 15 nt, Homo sapiens
guaaggggaauugag

SEQ ID NO: 51592 - RNA, 19 nt, Homo sapiens
guaaguaaacggucucuca

SEQ ID NO: 51593 - RNA, 21 nt, Homo sapiens
guaaguuuaugcauacaguaa

SEQ ID NO: 51594 - RNA, 16 nt, Homo sapiens
guaaucccagcacuuu

SEQ ID NO: 51595 - RNA, 20 nt, Homo sapiens
guaaucccagcuacuuggga

SEQ ID NO: 51596 - RNA, 22 nt, Homo sapiens
guaauuauauaguuacccaaau

SEQ ID NO: 51597 - RNA, 21 nt, Homo sapiens
guacacuguuucaaacuuuac

SEQ ID NO: 51598 - RNA, 13 nt, Homo sapiens
guacaucaaugau

SEQ ID NO: 51599 - RNA, 21 nt, Homo sapiens
guacauccauggugugcuggc

SEQ ID NO: 51600 - RNA, 22 nt, Homo sapiens
guacauccauggugugcuggcu

SEQ ID NO: 51601 - RNA, 21 nt, Homo sapiens
guacauuuccaaauucacaag

SEQ ID NO: 51602 - RNA, 13 nt, Homo sapiens
guaccauaauucu

SEQ ID NO: 51603 - RNA, 22 nt, Homo sapiens
guaccuaacgaaguauccuuca

SEQ ID NO: 51604 - RNA, 23 nt, Homo sapiens
guaccucugcuauuugcuguuau

SEQ ID NO: 51605 - RNA, 13 nt, Homo sapiens
guacgcgagcgcg

SEQ ID NO: 51606 - RNA, 14 nt, Homo sapiens
guacgcgagcgcgc

SEQ ID NO: 51607 - RNA, 15 nt, Homo sapiens
guacgcgagcgcgcg

SEQ ID NO: 51608 - RNA, 16 nt, Homo sapiens
guacgcgagcgcgcgc

SEQ ID NO: 51609 - RNA, 17 nt, Homo sapiens
guacgcgagcgcgcgcg

SEQ ID NO: 51610 - RNA, 20 nt, Homo sapiens
guacgcgagcgcgcgcgccc

SEQ ID NO: 51611 - RNA, 21 nt, Homo sapiens
guacgcgagcgcgcgcgcccu

SEQ ID NO: 51612 - RNA, 17 nt, Homo sapiens
guacguugugcauuugg

SEQ ID NO: 51613 - RNA, 13 nt, Homo sapiens
guacuccagccug

SEQ ID NO: 51614 - RNA, 14 nt, Homo sapiens
guacuccagccugg

SEQ ID NO: 51615 - RNA, 20 nt, Homo sapiens
guacuccagccugggugaca

SEQ ID NO: 51616 - RNA, 23 nt, Homo sapiens
guagaaaaagcaguaacugacaa

SEQ ID NO: 51617 - RNA, 19 nt, Homo sapiens
guagaaaagggaacugaac

SEQ ID NO: 51618 - RNA, 15 nt, Homo sapiens
guagaauauauuucc

SEQ ID NO: 51619 - RNA, 16 nt, Homo sapiens
guagaauauauuuccu

SEQ ID NO: 51620 - RNA, 21 nt, Homo sapiens
guagaauguuuucaaauguuc

SEQ ID NO: 51621 - RNA, 21 nt, Homo sapiens
guagaggguguguaaguagau

SEQ ID NO: 51622 - RNA, 15 nt, Homo sapiens
guagauaugaggcau

SEQ ID NO: 51623 - RNA, 14 nt, Homo sapiens
guagcaaauuccaa

SEQ ID NO: 51624 - RNA, 14 nt, Homo sapiens
guagcagcucauaa

SEQ ID NO: 51625 - RNA, 15 nt, Homo sapiens
guagccacuucacuu

SEQ ID NO: 51626 - RNA, 16 nt, Homo sapiens
guagccacuucacuuu

SEQ ID NO: 51627 - RNA, 22 nt, Homo sapiens
guagcucucugaccuccuccuu

SEQ ID NO: 51628 - RNA, 22 nt, Homo sapiens
guaggugacuauuauauuucca

SEQ ID NO: 51629 - RNA, 13 nt, Homo sapiens
guaguuagcuuuc

SEQ ID NO: 51630 - RNA, 11 nt, Homo sapiens
guauauucaaa

SEQ ID NO: 51631 - RNA, 17 nt, Homo sapiens
guauccuucagccugaa

SEQ ID NO: 51632 - RNA, 16 nt, Homo sapiens
guaugacgugacuggc

SEQ ID NO: 51633 - RNA, 12 nt, Homo sapiens
guauggcaaacu

SEQ ID NO: 51634 - RNA, 14 nt, Homo sapiens
guauggcagcuuuc

SEQ ID NO: 51635 - RNA, 11 nt, Homo sapiens
guauguuuuca

SEQ ID NO: 51636 - RNA, 15 nt, Homo sapiens
guauuaaguuguuaa

SEQ ID NO: 51637 - RNA, 14 nt, Homo sapiens
guauuauaccuuuu

SEQ ID NO: 51638 - RNA, 21 nt, Homo sapiens
guauugcauuuaauuuauuga

SEQ ID NO: 51639 - RNA, 20 nt, Homo sapiens
guauuuuaaaagaaugauua

SEQ ID NO: 51640 - RNA, 16 nt, Homo sapiens
guauuuuacuuuucca

SEQ ID NO: 51641 - RNA, 23 nt, Homo sapiens
guauuuuauuacaucuuucacau

SEQ ID NO: 51642 - RNA, 15 nt, Homo sapiens
guauuuucagcagag

SEQ ID NO: 51643 - RNA, 17 nt, Homo sapiens
guauuuuuuuacuaaua

SEQ ID NO: 51644 - RNA, 12 nt, Homo sapiens
gucaacauuucu

SEQ ID NO: 51645 - RNA, 22 nt, Homo sapiens
gucaaccccaaguuaguucaau

SEQ ID NO: 51646 - RNA, 19 nt, Homo sapiens
gucaaggcuuagacccuca

SEQ ID NO: 51647 - RNA, 14 nt, Homo sapiens
gucaaugcagcccc

SEQ ID NO: 51648 - RNA, 23 nt, Homo sapiens
gucacacaaccugucccagcgag

SEQ ID NO: 51649 - RNA, 12 nt, Homo sapiens
gucacauuccaa

SEQ ID NO: 51650 - RNA, 18 nt, Homo sapiens
gucacuuuacugucccca

SEQ ID NO: 51651 - RNA, 19 nt, Homo sapiens
gucacuuuacuguccccau

SEQ ID NO: 51652 - RNA, 16 nt, Homo sapiens
gucagaagaccugguc

SEQ ID NO: 51653 - RNA, 23 nt, Homo sapiens
gucaggaguuccuaaccagccug

SEQ ID NO: 51654 - RNA, 19 nt, Homo sapiens
gucagugcccaacuguuau

SEQ ID NO: 51655 - RNA, 14 nt, Homo sapiens
gucauuauguuaau

SEQ ID NO: 51656 - RNA, 14 nt, Homo sapiens
gucauuguucuugu

SEQ ID NO: 51657 - RNA, 14 nt, Homo sapiens
gucauuuuuuuuaa

SEQ ID NO: 51658 - RNA, 15 nt, Homo sapiens
guccaagcauaccaa

SEQ ID NO: 51659 - RNA, 14 nt, Homo sapiens
guccccagagcuac

SEQ ID NO: 51660 - RNA, 24 nt, Homo sapiens
gucccuagcccuuacguccuucca

SEQ ID NO: 51661 - RNA, 11 nt, Homo sapiens
gucccugcugc

SEQ ID NO: 51662 - RNA, 12 nt, Homo sapiens
gucccugcugcc

SEQ ID NO: 51663 - RNA, 14 nt, Homo sapiens
gucccugcugcccu

SEQ ID NO: 51664 - RNA, 15 nt, Homo sapiens
guccgcuauccacca

SEQ ID NO: 51665 - RNA, 16 nt, Homo sapiens
guccgggucgcaggac

SEQ ID NO: 51666 - RNA, 18 nt, Homo sapiens
guccgggucgcaggacca

SEQ ID NO: 51667 - RNA, 21 nt, Homo sapiens
guccgggucgcaggaccaucc

SEQ ID NO: 51668 - RNA, 19 nt, Homo sapiens
guccuaagucccugcugcc

SEQ ID NO: 51669 - RNA, 17 nt, Homo sapiens
gucgcaggaccaucccg

SEQ ID NO: 51670 - RNA, 18 nt, Homo sapiens
gucgcaggaccaucccgg

SEQ ID NO: 51671 - RNA, 19 nt, Homo sapiens
gucgcaggaccaucccggc

SEQ ID NO: 51672 - RNA, 21 nt, Homo sapiens
gucgcaggaccaucccggccg

SEQ ID NO: 51673 - RNA, 23 nt, Homo sapiens
gucgcaggaccaucccggccggc

SEQ ID NO: 51674 - RNA, 13 nt, Homo sapiens
gucgccggcaucu

SEQ ID NO: 51675 - RNA, 15 nt, Homo sapiens
gucggaaaacaugcu

SEQ ID NO: 51676 - RNA, 22 nt, Homo sapiens
gucuaccaaaaaucucaauauu

SEQ ID NO: 51677 - RNA, 15 nt, Homo sapiens
gucuaccuguucgcg

SEQ ID NO: 51678 - RNA, 16 nt, Homo sapiens
gucuaccuguucgcgc

SEQ ID NO: 51679 - RNA, 17 nt, Homo sapiens
gucuaccuguucgcgcg

SEQ ID NO: 51680 - RNA, 20 nt, Homo sapiens
gucuaccuguucgcgcgccu

SEQ ID NO: 51681 - RNA, 21 nt, Homo sapiens
gucuaccuguucgcgcgccuc

SEQ ID NO: 51682 - RNA, 21 nt, Homo sapiens
gucuauuuacggaacucaaau

SEQ ID NO: 51683 - RNA, 21 nt, Homo sapiens
gucucagugucaaugcagccc

SEQ ID NO: 51684 - RNA, 22 nt, Homo sapiens
gucucaguguccucaucuguaa

SEQ ID NO: 51685 - RNA, 17 nt, Homo sapiens
gucucccaaagugcugg

SEQ ID NO: 51686 - RNA, 18 nt, Homo sapiens
gucucccaaagugcuggg

SEQ ID NO: 51687 - RNA, 15 nt, Homo sapiens
gucucgaacugcugg

SEQ ID NO: 51688 - RNA, 16 nt, Homo sapiens
gucucgaacugcugga

SEQ ID NO: 51689 - RNA, 17 nt, Homo sapiens
gucucgaacugcuggau

SEQ ID NO: 51690 - RNA, 18 nt, Homo sapiens
gucucgaacugcuggauu

SEQ ID NO: 51691 - RNA, 15 nt, Homo sapiens
gucucuaucauuaaa

SEQ ID NO: 51692 - RNA, 19 nt, Homo sapiens
gucucugaagugaaacugc

SEQ ID NO: 51693 - RNA, 22 nt, Homo sapiens
gucuuguguuucuuuaguuuuu

SEQ ID NO: 51694 - RNA, 15 nt, Homo sapiens
gugaaagaggcagcu

SEQ ID NO: 51695 - RNA, 24 nt, Homo sapiens
gugaacaaauuuacagagacagaa

SEQ ID NO: 51696 - RNA, 23 nt, Homo sapiens
gugaagacaaugacuuacuguac

SEQ ID NO: 51697 - RNA, 23 nt, Homo sapiens
gugaauuuuucucuaacucagaa

SEQ ID NO: 51698 - RNA, 14 nt, Homo sapiens
gugacccugaugaa

SEQ ID NO: 51699 - RNA, 12 nt, Homo sapiens
gugacuggccug

SEQ ID NO: 51700 - RNA, 18 nt, Homo sapiens
gugacuggccugcuggau

SEQ ID NO: 51701 - RNA, 16 nt, Homo sapiens
gugacuuaguguacau

SEQ ID NO: 51702 - RNA, 18 nt, Homo sapiens
gugagacagcucugcaua

SEQ ID NO: 51703 - RNA, 16 nt, Homo sapiens
gugagcaucacaguuu

SEQ ID NO: 51704 - RNA, 22 nt, Homo sapiens
gugauccgcccaucuccgucuc

SEQ ID NO: 51705 - RNA, 20 nt, Homo sapiens
gugaugacauaucacauguc

SEQ ID NO: 51706 - RNA, 19 nt, Homo sapiens
gugauuacccucugggucu

SEQ ID NO: 51707 - RNA, 21 nt, Homo sapiens
gugauuacccucugggucuca

SEQ ID NO: 51708 - RNA, 17 nt, Homo sapiens
gugauucccuccugcua

SEQ ID NO: 51709 - RNA, 18 nt, Homo sapiens
gugauucccuccugcuac

SEQ ID NO: 51710 - RNA, 12 nt, Homo sapiens
gugauuuuugua

SEQ ID NO: 51711 - RNA, 14 nt, Homo sapiens
gugcacuaaugugu

SEQ ID NO: 51712 - RNA, 14 nt, Homo sapiens
gugcauauuuuauu

SEQ ID NO: 51713 - RNA, 16 nt, Homo sapiens
gugcauauuuuauuau

SEQ ID NO: 51714 - RNA, 17 nt, Homo sapiens
gugccaguuauggcuau

SEQ ID NO: 51715 - RNA, 17 nt, Homo sapiens
gugccucaccccuugcc

SEQ ID NO: 51716 - RNA, 16 nt, Homo sapiens
gugccuguaaucacag

SEQ ID NO: 51717 - RNA, 12 nt, Homo sapiens
gugcggccuggu

SEQ ID NO: 51718 - RNA, 13 nt, Homo sapiens
gugcggccugguc

SEQ ID NO: 51719 - RNA, 13 nt, Homo sapiens
gugcuacaaaaac

SEQ ID NO: 51720 - RNA, 23 nt, Homo sapiens
gugcugggaauuacaggcgugag

SEQ ID NO: 51721 - RNA, 24 nt, Homo sapiens
gugcugggaauuacaggcgugagc

SEQ ID NO: 51722 - RNA, 13 nt, Homo sapiens
gugcuuggcccag

SEQ ID NO: 51723 - RNA, 16 nt, Homo sapiens
gugcuuggcccaggag

SEQ ID NO: 51724 - RNA, 18 nt, Homo sapiens
gugcuuggcccaggaguu

SEQ ID NO: 51725 - RNA, 21 nt, Homo sapiens
gugcuuuccguggcacugcau

SEQ ID NO: 51726 - RNA, 21 nt, Homo sapiens
guggagggggcgcgugcaggc

SEQ ID NO: 51727 - RNA, 15 nt, Homo sapiens
guggaugauguuucg

SEQ ID NO: 51728 - RNA, 18 nt, Homo sapiens
guggcauguaugacguga

SEQ ID NO: 51729 - RNA, 15 nt, Homo sapiens
guggcauuuucacuu

SEQ ID NO: 51730 - RNA, 16 nt, Homo sapiens
guggcauuuucacuuu

SEQ ID NO: 51731 - RNA, 14 nt, Homo sapiens
guggcgacucuaua

SEQ ID NO: 51732 - RNA, 13 nt, Homo sapiens
guggcgcgcgcca

SEQ ID NO: 51733 - RNA, 11 nt, Homo sapiens
guggcgcuggc

SEQ ID NO: 51734 - RNA, 12 nt, Homo sapiens
guggcgcuggcu

SEQ ID NO: 51735 - RNA, 13 nt, Homo sapiens
guggcgcuggcug

SEQ ID NO: 51736 - RNA, 16 nt, Homo sapiens
guggcgcuggcugcgc

SEQ ID NO: 51737 - RNA, 23 nt, Homo sapiens
guggcgcuggcugcgcucggccu

SEQ ID NO: 51738 - RNA, 22 nt, Homo sapiens
gugggacagucaccucauggaa

SEQ ID NO: 51739 - RNA, 23 nt, Homo sapiens
gugggacaguuccugagaccagc

SEQ ID NO: 51740 - RNA, 15 nt, Homo sapiens
gugggaccugggcca

SEQ ID NO: 51741 - RNA, 16 nt, Homo sapiens
gugggagaauucuuac

SEQ ID NO: 51742 - RNA, 21 nt, Homo sapiens
gugggauacuauuuaauuauu

SEQ ID NO: 51743 - RNA, 10 nt, Homo sapiens
gugggcucug

SEQ ID NO: 51744 - RNA, 13 nt, Homo sapiens
guggggcagugcu

SEQ ID NO: 51745 - RNA, 16 nt, Homo sapiens
guggggcagugcuugg

SEQ ID NO: 51746 - RNA, 18 nt, Homo sapiens
guggggcagugcuuggcc

SEQ ID NO: 51747 - RNA, 14 nt, Homo sapiens
guggguagacacac

SEQ ID NO: 51748 - RNA, 13 nt, Homo sapiens
guggguggggcag

SEQ ID NO: 51749 - RNA, 16 nt, Homo sapiens
guggguggggcagugc

SEQ ID NO: 51750 - RNA, 13 nt, Homo sapiens
gugggugggguga

SEQ ID NO: 51751 - RNA, 21 nt, Homo sapiens
gugguuauuuagggaacugcu

SEQ ID NO: 51752 - RNA, 15 nt, Homo sapiens
gugguuucagaaaug

SEQ ID NO: 51753 - RNA, 12 nt, Homo sapiens
gugucaggugac

SEQ ID NO: 51754 - RNA, 16 nt, Homo sapiens
gugucaguggaugcug

SEQ ID NO: 51755 - RNA, 20 nt, Homo sapiens
gugucuggcacuugggacaa

SEQ ID NO: 51756 - RNA, 13 nt, Homo sapiens
gugugaggaaaac

SEQ ID NO: 51757 - RNA, 20 nt, Homo sapiens
gugugauuuggggauauuuu

SEQ ID NO: 51758 - RNA, 14 nt, Homo sapiens
gugugggcaauguu

SEQ ID NO: 51759 - RNA, 20 nt, Homo sapiens
guguuggaaaaugugcaaua

SEQ ID NO: 51760 - RNA, 18 nt, Homo sapiens
guguuuuucacauuugcg

SEQ ID NO: 51761 - RNA, 23 nt, Homo sapiens
guuaauauuucuucgugaugaca

SEQ ID NO: 51762 - RNA, 19 nt, Homo sapiens
guuaaucuuucaaaguguc

SEQ ID NO: 51763 - RNA, 15 nt, Homo sapiens
guuacaacacggacg

SEQ ID NO: 51764 - RNA, 22 nt, Homo sapiens
guuaccaguaacggaacaguau

SEQ ID NO: 51765 - RNA, 18 nt, Homo sapiens
guuagagaauuuccuuac

SEQ ID NO: 51766 - RNA, 17 nt, Homo sapiens
guuauaaucuuucacag

SEQ ID NO: 51767 - RNA, 19 nt, Homo sapiens
guuaugauuaaguaaugau

SEQ ID NO: 51768 - RNA, 19 nt, Homo sapiens
guuaugcauaaagucagug

SEQ ID NO: 51769 - RNA, 12 nt, Homo sapiens
guuauuuauaau

SEQ ID NO: 51770 - RNA, 19 nt, Homo sapiens
guuauuuauaaucacuuuu

SEQ ID NO: 51771 - RNA, 20 nt, Homo sapiens
guuauuuauaaucacuuuuu

SEQ ID NO: 51772 - RNA, 21 nt, Homo sapiens
guuauuuauaaucacuuuuuu

SEQ ID NO: 51773 - RNA, 17 nt, Homo sapiens
guuauuuuaucugcuau

SEQ ID NO: 51774 - RNA, 22 nt, Homo sapiens
guuauuuuaucugcuaugcuau

SEQ ID NO: 51775 - RNA, 23 nt, Homo sapiens
guuauuuuaucugcuaugcuauu

SEQ ID NO: 51776 - RNA, 17 nt, Homo sapiens
guuauuuuuaaacugua

SEQ ID NO: 51777 - RNA, 21 nt, Homo sapiens
guuauuuuuaauuugguuuuc

SEQ ID NO: 51778 - RNA, 23 nt, Homo sapiens
guuauuuuuaauuugguuuucac

SEQ ID NO: 51779 - RNA, 15 nt, Homo sapiens
guucaaagauauuuu

SEQ ID NO: 51780 - RNA, 12 nt, Homo sapiens
guucaaauguug

SEQ ID NO: 51781 - RNA, 17 nt, Homo sapiens
guucaugaaagauucaa

SEQ ID NO: 51782 - RNA, 18 nt, Homo sapiens
guucaugaaagauucaau

SEQ ID NO: 51783 - RNA, 16 nt, Homo sapiens
guucccgugugccuga

SEQ ID NO: 51784 - RNA, 17 nt, Homo sapiens
guucccuugaugaagaa

SEQ ID NO: 51785 - RNA, 16 nt, Homo sapiens
guuccuaaccagccug

SEQ ID NO: 51786 - RNA, 17 nt, Homo sapiens
guuccuaaccagccugg

SEQ ID NO: 51787 - RNA, 14 nt, Homo sapiens
guuccucgccacgc

SEQ ID NO: 51788 - RNA, 15 nt, Homo sapiens
guuccucgccacgcu

SEQ ID NO: 51789 - RNA, 16 nt, Homo sapiens
guuccugagaccagcc

SEQ ID NO: 51790 - RNA, 17 nt, Homo sapiens
guuccugagaccagcca

SEQ ID NO: 51791 - RNA, 23 nt, Homo sapiens
guuccugagaccagccaaccugg

SEQ ID NO: 51792 - RNA, 18 nt, Homo sapiens
guuccuucacauccugug

SEQ ID NO: 51793 - RNA, 14 nt, Homo sapiens
guucgcgcgccucc

SEQ ID NO: 51794 - RNA, 15 nt, Homo sapiens
guucgcgcgccuccg

SEQ ID NO: 51795 - RNA, 17 nt, Homo sapiens
guucgcgcgccuccgcu

SEQ ID NO: 51796 - RNA, 16 nt, Homo sapiens
guucuauaacaacaac

SEQ ID NO: 51797 - RNA, 22 nt, Homo sapiens
guucuauaacaacaacaacaaa

SEQ ID NO: 51798 - RNA, 21 nt, Homo sapiens
guucuccagucauuauguuaa

SEQ ID NO: 51799 - RNA, 12 nt, Homo sapiens
guucugaagaag

SEQ ID NO: 51800 - RNA, 13 nt, Homo sapiens
guucugaagaaga

SEQ ID NO: 51801 - RNA, 20 nt, Homo sapiens
guucuucuuggucucagugu

SEQ ID NO: 51802 - RNA, 16 nt, Homo sapiens
guucuuuggggagcca

SEQ ID NO: 51803 - RNA, 22 nt, Homo sapiens
guugaccaauaaccaugcccaa

SEQ ID NO: 51804 - RNA, 13 nt, Homo sapiens
guugauggaaaua

SEQ ID NO: 51805 - RNA, 14 nt, Homo sapiens
guugauggaaauac

SEQ ID NO: 51806 - RNA, 23 nt, Homo sapiens
guugauuucagcaccuacagugu

SEQ ID NO: 51807 - RNA, 16 nt, Homo sapiens
guugcagcccugcugc

SEQ ID NO: 51808 - RNA, 18 nt, Homo sapiens
guugcagcccugcugcug

SEQ ID NO: 51809 - RNA, 19 nt, Homo sapiens
guugcagcccugcugcugc

SEQ ID NO: 51810 - RNA, 20 nt, Homo sapiens
guugcagcccugcugcugcc

SEQ ID NO: 51811 - RNA, 23 nt, Homo sapiens
guugcagcccugcugcugccugc

SEQ ID NO: 51812 - RNA, 13 nt, Homo sapiens
guugccaaggcug

SEQ ID NO: 51813 - RNA, 14 nt, Homo sapiens
guugccaaggcugg

SEQ ID NO: 51814 - RNA, 16 nt, Homo sapiens
guugccaaggcuggag

SEQ ID NO: 51815 - RNA, 15 nt, Homo sapiens
guugcuguaugucuc

SEQ ID NO: 51816 - RNA, 14 nt, Homo sapiens
guuggaggcugcaa

SEQ ID NO: 51817 - RNA, 15 nt, Homo sapiens
guuggaggcugcaaa

SEQ ID NO: 51818 - RNA, 23 nt, Homo sapiens
guuguucucuucuuuaaagggau

SEQ ID NO: 51819 - RNA, 13 nt, Homo sapiens
guuguuggaggcu

SEQ ID NO: 51820 - RNA, 19 nt, Homo sapiens
guuguuggauaaaucagug

SEQ ID NO: 51821 - RNA, 15 nt, Homo sapiens
guuuaaaaucauuuc

SEQ ID NO: 51822 - RNA, 18 nt, Homo sapiens
guuuaaugggcacagggu

SEQ ID NO: 51823 - RNA, 15 nt, Homo sapiens
guuuagcagauuuaa

SEQ ID NO: 51824 - RNA, 23 nt, Homo sapiens
guuuagcauaguaccucugcuau

SEQ ID NO: 51825 - RNA, 15 nt, Homo sapiens
guuuaugauuccacc

SEQ ID NO: 51826 - RNA, 20 nt, Homo sapiens
guuuaugcauagauaaucuc

SEQ ID NO: 51827 - RNA, 17 nt, Homo sapiens
guuucauaagaauucug

SEQ ID NO: 51828 - RNA, 18 nt, Homo sapiens
guuucauaagaauucugu

SEQ ID NO: 51829 - RNA, 18 nt, Homo sapiens
guuuccauagggugacac

SEQ ID NO: 51830 - RNA, 23 nt, Homo sapiens
guuuccuagcacacacuuuuggu

SEQ ID NO: 51831 - RNA, 17 nt, Homo sapiens
guuuccuagcgcagcca

SEQ ID NO: 51832 - RNA, 23 nt, Homo sapiens
guuuccuagcgcagccaugugau

SEQ ID NO: 51833 - RNA, 16 nt, Homo sapiens
guuucuaugacacaug

SEQ ID NO: 51834 - RNA, 22 nt, Homo sapiens
guuugcauaggugaucucauuu

SEQ ID NO: 51835 - RNA, 20 nt, Homo sapiens
guuugccaugcuggccaggc

SEQ ID NO: 51836 - RNA, 23 nt, Homo sapiens
guuugccaugcuggccaggcugg

SEQ ID NO: 51837 - RNA, 13 nt, Homo sapiens
guuugcuaagcau

SEQ ID NO: 51838 - RNA, 19 nt, Homo sapiens
guuuggacaaaauggaaua

SEQ ID NO: 51839 - RNA, 20 nt, Homo sapiens
guuuggccagaagucaaggc

SEQ ID NO: 51840 - RNA, 14 nt, Homo sapiens
guuugugauugcca

SEQ ID NO: 51841 - RNA, 21 nt, Homo sapiens
guuuuacaguguuucuggcuu

SEQ ID NO: 51842 - RNA, 20 nt, Homo sapiens
guuuuaggaauacauaaagu

SEQ ID NO: 51843 - RNA, 13 nt, Homo sapiens
guuuucugacuaa

SEQ ID NO: 51844 - RNA, 20 nt, Homo sapiens
guuuugcaagccagauuuuc

SEQ ID NO: 51845 - RNA, 14 nt, Homo sapiens
guuuuuaagcuguu

SEQ ID NO: 51846 - RNA, 15 nt, Homo sapiens
guuuuuaagcuguuu

SEQ ID NO: 51847 - RNA, 23 nt, Homo sapiens
guuuuuauggcuuuugugcauua

SEQ ID NO: 51848 - RNA, 12 nt, Homo sapiens
guuuuucacauu

SEQ ID NO: 51849 - RNA, 18 nt, Homo sapiens
guuuuuccacuacugcua

SEQ ID NO: 51850 - RNA, 19 nt, Homo sapiens
guuuuuccacuacugcuac

SEQ ID NO: 51851 - RNA, 23 nt, Homo sapiens
uaaaaaaaaaaaaaaagccaaaa

SEQ ID NO: 51852 - RNA, 22 nt, Homo sapiens
uaaaaaaaaaacguauugcauu

SEQ ID NO: 51853 - RNA, 23 nt, Homo sapiens
uaaaaaaaaaacguauugcauuu

SEQ ID NO: 51854 - RNA, 13 nt, Homo sapiens
uaaaaaauggaac

SEQ ID NO: 51855 - RNA, 22 nt, Homo sapiens
uaaaaauauauagcgacauccu

SEQ ID NO: 51856 - RNA, 14 nt, Homo sapiens
uaaaaccacagcag

SEQ ID NO: 51857 - RNA, 15 nt, Homo sapiens
uaaaaccacagcagu

SEQ ID NO: 51858 - RNA, 19 nt, Homo sapiens
uaaaacuaggugcugcagc

SEQ ID NO: 51859 - RNA, 14 nt, Homo sapiens
uaaaacucauuuuu

SEQ ID NO: 51860 - RNA, 11 nt, Homo sapiens
uaaaacuggga

SEQ ID NO: 51861 - RNA, 13 nt, Homo sapiens
uaaaagauacagu

SEQ ID NO: 51862 - RNA, 12 nt, Homo sapiens
uaaaagcacuua

SEQ ID NO: 51863 - RNA, 23 nt, Homo sapiens
uaaaaguacauguuaaacuuacu

SEQ ID NO: 51864 - RNA, 15 nt, Homo sapiens
uaaaauaauuuuuau

SEQ ID NO: 51865 - RNA, 17 nt, Homo sapiens
uaaaauaauuuuuauau

SEQ ID NO: 51866 - RNA, 15 nt, Homo sapiens
uaaaauacacacuca

SEQ ID NO: 51867 - RNA, 17 nt, Homo sapiens
uaaaauacacacucaaa

SEQ ID NO: 51868 - RNA, 20 nt, Homo sapiens
uaaaauauuuuuaugugcaa

SEQ ID NO: 51869 - RNA, 20 nt, Homo sapiens
uaaaaucacaaacucaucca

SEQ ID NO: 51870 - RNA, 21 nt, Homo sapiens
uaaaauggagacaccaccacc

SEQ ID NO: 51871 - RNA, 20 nt, Homo sapiens
uaaaauuaucaauaucuaau

SEQ ID NO: 51872 - RNA, 8 nt, Homo sapiens
uaaaauuu

SEQ ID NO: 51873 - RNA, 9 nt, Homo sapiens
uaaaauuuu

SEQ ID NO: 51874 - RNA, 21 nt, Homo sapiens
uaaacaguagugauaguugua

SEQ ID NO: 51875 - RNA, 17 nt, Homo sapiens
uaaacauguauguaaau

SEQ ID NO: 51876 - RNA, 22 nt, Homo sapiens
uaaacauugguucuuguauuaa

SEQ ID NO: 51877 - RNA, 15 nt, Homo sapiens
uaaaccuaugaauaa

SEQ ID NO: 51878 - RNA, 20 nt, Homo sapiens
uaaacuuacuuaguguuaug

SEQ ID NO: 51879 - RNA, 15 nt, Homo sapiens
uaaagaucauguaaa

SEQ ID NO: 51880 - RNA, 15 nt, Homo sapiens
uaaagcuuugugcag

SEQ ID NO: 51881 - RNA, 17 nt, Homo sapiens
uaaagcuuugugcagau

SEQ ID NO: 51882 - RNA, 14 nt, Homo sapiens
uaaaggaagguucu

SEQ ID NO: 51883 - RNA, 17 nt, Homo sapiens
uaaaguacagacuuuuu

SEQ ID NO: 51884 - RNA, 20 nt, Homo sapiens
uaaaguguauuuuuuuacua

SEQ ID NO: 51885 - RNA, 21 nt, Homo sapiens
uaaaguguauuuuuuuacuaa

SEQ ID NO: 51886 - RNA, 14 nt, Homo sapiens
uaaaguucuaguga

SEQ ID NO: 51887 - RNA, 13 nt, Homo sapiens
uaaauaaaauuuu

SEQ ID NO: 51888 - RNA, 21 nt, Homo sapiens
uaaauaaauguaucuuauuca

SEQ ID NO: 51889 - RNA, 15 nt, Homo sapiens
uaaauaauaaagauc

SEQ ID NO: 51890 - RNA, 12 nt, Homo sapiens
uaaauagcuaag

SEQ ID NO: 51891 - RNA, 19 nt, Homo sapiens
uaaauagcuaagauauaau

SEQ ID NO: 51892 - RNA, 20 nt, Homo sapiens
uaaauggacaaaugcuuaug

SEQ ID NO: 51893 - RNA, 17 nt, Homo sapiens
uaaaugggggugcauuu

SEQ ID NO: 51894 - RNA, 19 nt, Homo sapiens
uaaaugggggugcauuuga

SEQ ID NO: 51895 - RNA, 14 nt, Homo sapiens
uaaauguaucuuau

SEQ ID NO: 51896 - RNA, 20 nt, Homo sapiens
uaaauguaucuuauucacau

SEQ ID NO: 51897 - RNA, 20 nt, Homo sapiens
uaaauucccuggccuuucau

SEQ ID NO: 51898 - RNA, 16 nt, Homo sapiens
uaaauucuuucauuuu

SEQ ID NO: 51899 - RNA, 17 nt, Homo sapiens
uaaauuugguucuaggc

SEQ ID NO: 51900 - RNA, 12 nt, Homo sapiens
uaacaaaauuug

SEQ ID NO: 51901 - RNA, 19 nt, Homo sapiens
uaacaacaacaacaaaagc

SEQ ID NO: 51902 - RNA, 16 nt, Homo sapiens
uaacaaugacuuguac

SEQ ID NO: 51903 - RNA, 23 nt, Homo sapiens
uaacaaugcuguauuuuaaaaga

SEQ ID NO: 51904 - RNA, 13 nt, Homo sapiens
uaacacagugucu

SEQ ID NO: 51905 - RNA, 14 nt, Homo sapiens
uaacagaaauguac

SEQ ID NO: 51906 - RNA, 16 nt, Homo sapiens
uaacagaaauguacag

SEQ ID NO: 51907 - RNA, 17 nt, Homo sapiens
uaacagaaauguacagc

SEQ ID NO: 51908 - RNA, 22 nt, Homo sapiens
uaaccaaagcccaaagugguau

SEQ ID NO: 51909 - RNA, 14 nt, Homo sapiens
uaaccagcagaaau

SEQ ID NO: 51910 - RNA, 18 nt, Homo sapiens
uaaccagcagaaaugccu

SEQ ID NO: 51911 - RNA, 22 nt, Homo sapiens
uaaccagcagaaaugccuuacc

SEQ ID NO: 51912 - RNA, 19 nt, Homo sapiens
uaaccucuaaauucuuuca

SEQ ID NO: 51913 - RNA, 17 nt, Homo sapiens
uaacuagaauuuauuca

SEQ ID NO: 51914 - RNA, 14 nt, Homo sapiens
uaacugcauugaga

SEQ ID NO: 51915 - RNA, 15 nt, Homo sapiens
uaacuggcaguuuuc

SEQ ID NO: 51916 - RNA, 17 nt, Homo sapiens
uaacuuaugaaccuuua

SEQ ID NO: 51917 - RNA, 17 nt, Homo sapiens
uaagaaaaaggaugcac

SEQ ID NO: 51918 - RNA, 11 nt, Homo sapiens
uaagaaaauau

SEQ ID NO: 51919 - RNA, 13 nt, Homo sapiens
uaagaaugaaaua

SEQ ID NO: 51920 - RNA, 21 nt, Homo sapiens
uaagagaacaagcaaauauaa

SEQ ID NO: 51921 - RNA, 14 nt, Homo sapiens
uaagagagucuauu

SEQ ID NO: 51922 - RNA, 21 nt, Homo sapiens
uaagcaaagacuaugaggaau

SEQ ID NO: 51923 - RNA, 13 nt, Homo sapiens
uaagcaacaucua

SEQ ID NO: 51924 - RNA, 21 nt, Homo sapiens
uaagcacuuuaacacaguguc

SEQ ID NO: 51925 - RNA, 11 nt, Homo sapiens
uaaggaaacug

SEQ ID NO: 51926 - RNA, 13 nt, Homo sapiens
uaaggaaacuggg

SEQ ID NO: 51927 - RNA, 14 nt, Homo sapiens
uaaggaaacugggu

SEQ ID NO: 51928 - RNA, 16 nt, Homo sapiens
uaagggaaacugccag

SEQ ID NO: 51929 - RNA, 21 nt, Homo sapiens
uaagguauauaaauuuuccca

SEQ ID NO: 51930 - RNA, 13 nt, Homo sapiens
uaaguaaaaccac

SEQ ID NO: 51931 - RNA, 14 nt, Homo sapiens
uaaguaaaaccaca

SEQ ID NO: 51932 - RNA, 22 nt, Homo sapiens
uaaguagggacuucugucuuca

SEQ ID NO: 51933 - RNA, 16 nt, Homo sapiens
uaaguaucagcuacaa

SEQ ID NO: 51934 - RNA, 19 nt, Homo sapiens
uaagucuguuuuaugacuu

SEQ ID NO: 51935 - RNA, 19 nt, Homo sapiens
uaagugaaauaagccagac

SEQ ID NO: 51936 - RNA, 18 nt, Homo sapiens
uaagugaagugauacuau

SEQ ID NO: 51937 - RNA, 11 nt, Homo sapiens
uaagugcagcc

SEQ ID NO: 51938 - RNA, 12 nt, Homo sapiens
uaagugcagccc

SEQ ID NO: 51939 - RNA, 19 nt, Homo sapiens
uaaguuacacauuuuucag

SEQ ID NO: 51940 - RNA, 18 nt, Homo sapiens
uaaguugcaccaacuuug

SEQ ID NO: 51941 - RNA, 20 nt, Homo sapiens
uaaguugcaccaacuuugaa

SEQ ID NO: 51942 - RNA, 19 nt, Homo sapiens
uaauaaaauacauacuaua

SEQ ID NO: 51943 - RNA, 18 nt, Homo sapiens
uaauaaaauucauuccau

SEQ ID NO: 51944 - RNA, 13 nt, Homo sapiens
uaauaauaaauuc

SEQ ID NO: 51945 - RNA, 14 nt, Homo sapiens
uaauaauguuucaa

SEQ ID NO: 51946 - RNA, 14 nt, Homo sapiens
uaauaucaucagua

SEQ ID NO: 51947 - RNA, 19 nt, Homo sapiens
uaauaugcacacauuuuuu

SEQ ID NO: 51948 - RNA, 13 nt, Homo sapiens
uaaucaacugggc

SEQ ID NO: 51949 - RNA, 15 nt, Homo sapiens
uaaucaauacuuuga

SEQ ID NO: 51950 - RNA, 12 nt, Homo sapiens
uaaucuuucaca

SEQ ID NO: 51951 - RNA, 15 nt, Homo sapiens
uaaugaaaaugaaua

SEQ ID NO: 51952 - RNA, 20 nt, Homo sapiens
uaaugaaaaugaauaucuau

SEQ ID NO: 51953 - RNA, 19 nt, Homo sapiens
uaaugaaguguuuagcaua

SEQ ID NO: 51954 - RNA, 14 nt, Homo sapiens
uaaugauaacugga

SEQ ID NO: 51955 - RNA, 22 nt, Homo sapiens
uaauggaauauguaaauagaaa

SEQ ID NO: 51956 - RNA, 21 nt, Homo sapiens
uaaugguaguuuuacaguguu

SEQ ID NO: 51957 - RNA, 18 nt, Homo sapiens
uaauguagauaaagcacu

SEQ ID NO: 51958 - RNA, 20 nt, Homo sapiens
uaauguagauaaagcacugu

SEQ ID NO: 51959 - RNA, 18 nt, Homo sapiens
uaauguagcagcucauaa

SEQ ID NO: 51960 - RNA, 14 nt, Homo sapiens
uaaugugacuugga

SEQ ID NO: 51961 - RNA, 18 nt, Homo sapiens
uaauguggaaaugauguu

SEQ ID NO: 51962 - RNA, 15 nt, Homo sapiens
uaauguuucaaacau

SEQ ID NO: 51963 - RNA, 11 nt, Homo sapiens
uaauuacuaug

SEQ ID NO: 51964 - RNA, 14 nt, Homo sapiens
uaauuacuauguca

SEQ ID NO: 51965 - RNA, 15 nt, Homo sapiens
uaauucaaacuaaua

SEQ ID NO: 51966 - RNA, 19 nt, Homo sapiens
uaauucuuagcucauucuc

SEQ ID NO: 51967 - RNA, 12 nt, Homo sapiens
uaauucuuuauc

SEQ ID NO: 51968 - RNA, 16 nt, Homo sapiens
uaauucuuuaucacau

SEQ ID NO: 51969 - RNA, 11 nt, Homo sapiens
uaauuggaaag

SEQ ID NO: 51970 - RNA, 12 nt, Homo sapiens
uaauuggaaagg

SEQ ID NO: 51971 - RNA, 13 nt, Homo sapiens
uaauuucaugaaa

SEQ ID NO: 51972 - RNA, 14 nt, Homo sapiens
uaauuugguuuuca

SEQ ID NO: 51973 - RNA, 21 nt, Homo sapiens
uaauuuguaguguuggagaag

SEQ ID NO: 51974 - RNA, 18 nt, Homo sapiens
uaauuuuagacauucuuu

SEQ ID NO: 51975 - RNA, 15 nt, Homo sapiens
uaauuuuauuauagu

SEQ ID NO: 51976 - RNA, 23 nt, Homo sapiens
uaauuuuuuugugggaaauccac

SEQ ID NO: 51977 - RNA, 15 nt, Homo sapiens
uacaaaaacacagca

SEQ ID NO: 51978 - RNA, 17 nt, Homo sapiens
uacaaaaacacagcaag

SEQ ID NO: 51979 - RNA, 19 nt, Homo sapiens
uacaaaaauuagccgggca

SEQ ID NO: 51980 - RNA, 20 nt, Homo sapiens
uacaaaaauuagccgggcau

SEQ ID NO: 51981 - RNA, 15 nt, Homo sapiens
uacaaaagcauguga

SEQ ID NO: 51982 - RNA, 18 nt, Homo sapiens
uacaaaauauagcuuuca

SEQ ID NO: 51983 - RNA, 19 nt, Homo sapiens
uacaaggcuuuaucucagg

SEQ ID NO: 51984 - RNA, 22 nt, Homo sapiens
uacaauuauuuuuacaguucuc

SEQ ID NO: 51985 - RNA, 19 nt, Homo sapiens
uacacauuuuauuuuauua

SEQ ID NO: 51986 - RNA, 16 nt, Homo sapiens
uacaccagagauaaua

SEQ ID NO: 51987 - RNA, 20 nt, Homo sapiens
uacacuguuaucuucacuuu

SEQ ID NO: 51988 - RNA, 18 nt, Homo sapiens
uacagagaaaagacauaa

SEQ ID NO: 51989 - RNA, 12 nt, Homo sapiens
uacagccaggcg

SEQ ID NO: 51990 - RNA, 20 nt, Homo sapiens
uacaggaacagaagaggaaa

SEQ ID NO: 51991 - RNA, 23 nt, Homo sapiens
uacaggcgugagccaccaaaccc

SEQ ID NO: 51992 - RNA, 16 nt, Homo sapiens
uacagucuuguauuaa

SEQ ID NO: 51993 - RNA, 16 nt, Homo sapiens
uacaguucucccaagg

SEQ ID NO: 51994 - RNA, 20 nt, Homo sapiens
uacaguuuuuauugcuuguu

SEQ ID NO: 51995 - RNA, 17 nt, Homo sapiens
uacauaaugcgugcaua

SEQ ID NO: 51996 - RNA, 16 nt, Homo sapiens
uacauacuauggaauu

SEQ ID NO: 51997 - RNA, 11 nt, Homo sapiens
uacauacugcu

SEQ ID NO: 51998 - RNA, 12 nt, Homo sapiens
uacauacugcug

SEQ ID NO: 51999 - RNA, 13 nt, Homo sapiens
uacauacugcugu

SEQ ID NO: 52000 - RNA, 19 nt, Homo sapiens
uacaucaaugauaaugcua

SEQ ID NO: 52001 - RNA, 12 nt, Homo sapiens
uacaucuuucac

SEQ ID NO: 52002 - RNA, 14 nt, Homo sapiens
uacaucuuucacau

SEQ ID NO: 52003 - RNA, 16 nt, Homo sapiens
uacauggcuggagcua

SEQ ID NO: 52004 - RNA, 19 nt, Homo sapiens
uacauguauuuguuugcau

SEQ ID NO: 52005 - RNA, 19 nt, Homo sapiens
uacauuauuggacuuccau

SEQ ID NO: 52006 - RNA, 23 nt, Homo sapiens
uacauuguuugucugucuucaua

SEQ ID NO: 52007 - RNA, 16 nt, Homo sapiens
uacauuuccaaauuca

SEQ ID NO: 52008 - RNA, 18 nt, Homo sapiens
uacauuuccaaauucaca

SEQ ID NO: 52009 - RNA, 19 nt, Homo sapiens
uacauuuccaaauucacaa

SEQ ID NO: 52010 - RNA, 13 nt, Homo sapiens
uaccaaaaaucuc

SEQ ID NO: 52011 - RNA, 22 nt, Homo sapiens
uaccacagacauacuaaccagc

SEQ ID NO: 52012 - RNA, 18 nt, Homo sapiens
uaccacaggaaccacaag

SEQ ID NO: 52013 - RNA, 13 nt, Homo sapiens
uacccaaauggaa

SEQ ID NO: 52014 - RNA, 14 nt, Homo sapiens
uacccaaauggaaa

SEQ ID NO: 52015 - RNA, 11 nt, Homo sapiens
uacccucuggg

SEQ ID NO: 52016 - RNA, 15 nt, Homo sapiens
uaccuaucaucuuaa

SEQ ID NO: 52017 - RNA, 18 nt, Homo sapiens
uaccucugccucagaaaa

SEQ ID NO: 52018 - RNA, 22 nt, Homo sapiens
uaccucugcuauuugcuguuau

SEQ ID NO: 52019 - RNA, 21 nt, Homo sapiens
uaccugugaaauaguucaaag

SEQ ID NO: 52020 - RNA, 17 nt, Homo sapiens
uaccuguucgcgcgccu

SEQ ID NO: 52021 - RNA, 18 nt, Homo sapiens
uaccuguucgcgcgccuc

SEQ ID NO: 52022 - RNA, 19 nt, Homo sapiens
uaccuguucgcgcgccucc

SEQ ID NO: 52023 - RNA, 21 nt, Homo sapiens
uaccuguucgcgcgccuccgc

SEQ ID NO: 52024 - RNA, 15 nt, Homo sapiens
uaccuuuuuccuucc

SEQ ID NO: 52025 - RNA, 17 nt, Homo sapiens
uaccuuuuuuauacaua

SEQ ID NO: 52026 - RNA, 16 nt, Homo sapiens
uacgcgagcgcgcgcg

SEQ ID NO: 52027 - RNA, 18 nt, Homo sapiens
uacgcgagcgcgcgcgcc

SEQ ID NO: 52028 - RNA, 19 nt, Homo sapiens
uacgcgagcgcgcgcgccc

SEQ ID NO: 52029 - RNA, 12 nt, Homo sapiens
uacgcgcgcucc

SEQ ID NO: 52030 - RNA, 16 nt, Homo sapiens
uacgcgcgcuccgcgc

SEQ ID NO: 52031 - RNA, 21 nt, Homo sapiens
uacgcgcgcuccgcgcagcuc

SEQ ID NO: 52032 - RNA, 11 nt, Homo sapiens
uacgugcaaua

SEQ ID NO: 52033 - RNA, 14 nt, Homo sapiens
uacguugugcauuu

SEQ ID NO: 52034 - RNA, 14 nt, Homo sapiens
uacuaauagacaau

SEQ ID NO: 52035 - RNA, 20 nt, Homo sapiens
uacuaauagacaauuuauua

SEQ ID NO: 52036 - RNA, 18 nt, Homo sapiens
uacuauagauucuuuauu

SEQ ID NO: 52037 - RNA, 20 nt, Homo sapiens
uacuauuuaagagaacaagc

SEQ ID NO: 52038 - RNA, 17 nt, Homo sapiens
uacucuguuccuucaca

SEQ ID NO: 52039 - RNA, 18 nt, Homo sapiens
uacucuguuccuucacau

SEQ ID NO: 52040 - RNA, 13 nt, Homo sapiens
uacucuuauaucu

SEQ ID NO: 52041 - RNA, 17 nt, Homo sapiens
uacugcuaccacaacua

SEQ ID NO: 52042 - RNA, 18 nt, Homo sapiens
uacuguaauuugugauac

SEQ ID NO: 52043 - RNA, 17 nt, Homo sapiens
uacuguccccaucauca

SEQ ID NO: 52044 - RNA, 23 nt, Homo sapiens
uacuucccgcuguuccucgccac

SEQ ID NO: 52045 - RNA, 13 nt, Homo sapiens
uacuucuucucau

SEQ ID NO: 52046 - RNA, 15 nt, Homo sapiens
uacuucuucucauac

SEQ ID NO: 52047 - RNA, 17 nt, Homo sapiens
uacuucuucucauacua

SEQ ID NO: 52048 - RNA, 21 nt, Homo sapiens
uacuuugaacacaaagccugu

SEQ ID NO: 52049 - RNA, 17 nt, Homo sapiens
uacuuuuaaacuuugau

SEQ ID NO: 52050 - RNA, 21 nt, Homo sapiens
uagaaaaauuagaugacugaa

SEQ ID NO: 52051 - RNA, 19 nt, Homo sapiens
uagaaagcugaguguuuca

SEQ ID NO: 52052 - RNA, 13 nt, Homo sapiens
uagaagauucuau

SEQ ID NO: 52053 - RNA, 15 nt, Homo sapiens
uagaagcaucacagg

SEQ ID NO: 52054 - RNA, 19 nt, Homo sapiens
uagaagucacauuccugaa

SEQ ID NO: 52055 - RNA, 21 nt, Homo sapiens
uagaauauauuuccuuauuca

SEQ ID NO: 52056 - RNA, 17 nt, Homo sapiens
uagaauauuuauuaccu

SEQ ID NO: 52057 - RNA, 23 nt, Homo sapiens
uagaauauuuauuaccucugaua

SEQ ID NO: 52058 - RNA, 16 nt, Homo sapiens
uagaauuaacacauga

SEQ ID NO: 52059 - RNA, 23 nt, Homo sapiens
uagaauuaacacaugauccugca

SEQ ID NO: 52060 - RNA, 15 nt, Homo sapiens
uagaauuaauggaau

SEQ ID NO: 52061 - RNA, 21 nt, Homo sapiens
uagaauucacuccacuuggac

SEQ ID NO: 52062 - RNA, 19 nt, Homo sapiens
uagacaauuuauuauggca

SEQ ID NO: 52063 - RNA, 15 nt, Homo sapiens
uagacauucuuuauc

SEQ ID NO: 52064 - RNA, 14 nt, Homo sapiens
uagacccucaugcu

SEQ ID NO: 52065 - RNA, 17 nt, Homo sapiens
uagacccucaugcugcc

SEQ ID NO: 52066 - RNA, 19 nt, Homo sapiens
uagacccucaugcugccaa

SEQ ID NO: 52067 - RNA, 17 nt, Homo sapiens
uagagaaauuugccaau

SEQ ID NO: 52068 - RNA, 19 nt, Homo sapiens
uagagaaauuugccaauuu

SEQ ID NO: 52069 - RNA, 16 nt, Homo sapiens
uagagaauuuccuuac

SEQ ID NO: 52070 - RNA, 16 nt, Homo sapiens
uagagugggacaguuc

SEQ ID NO: 52071 - RNA, 20 nt, Homo sapiens
uagagugggacaguuccuga

SEQ ID NO: 52072 - RNA, 14 nt, Homo sapiens
uagaguugauacua

SEQ ID NO: 52073 - RNA, 15 nt, Homo sapiens
uagauaaacucagaa

SEQ ID NO: 52074 - RNA, 14 nt, Homo sapiens
uagauaaagcacug

SEQ ID NO: 52075 - RNA, 22 nt, Homo sapiens
uagauaaagcacuguuuggaua

SEQ ID NO: 52076 - RNA, 20 nt, Homo sapiens
uagauaaucucuccauuccc

SEQ ID NO: 52077 - RNA, 12 nt, Homo sapiens
uagauacuguau

SEQ ID NO: 52078 - RNA, 14 nt, Homo sapiens
uagaugaaugucag

SEQ ID NO: 52079 - RNA, 17 nt, Homo sapiens
uagauguauagguugau

SEQ ID NO: 52080 - RNA, 19 nt, Homo sapiens
uagauucccugagcaggau

SEQ ID NO: 52081 - RNA, 20 nt, Homo sapiens
uagcaaaucuacugucaauu

SEQ ID NO: 52082 - RNA, 18 nt, Homo sapiens
uagcaaauuccaauacau

SEQ ID NO: 52083 - RNA, 12 nt, Homo sapiens
uagcaucucagg

SEQ ID NO: 52084 - RNA, 16 nt, Homo sapiens
uagccagguaccuucu

SEQ ID NO: 52085 - RNA, 18 nt, Homo sapiens
uagccagguaccuucuca

SEQ ID NO: 52086 - RNA, 13 nt, Homo sapiens
uagcuuuacuguu

SEQ ID NO: 52087 - RNA, 13 nt, Homo sapiens
uaggaaauauuua

SEQ ID NO: 52088 - RNA, 14 nt, Homo sapiens
uaggaaauauuuau

SEQ ID NO: 52089 - RNA, 18 nt, Homo sapiens
uaggaaauauuuauuuua

SEQ ID NO: 52090 - RNA, 11 nt, Homo sapiens
uaggaacuuaa

SEQ ID NO: 52091 - RNA, 12 nt, Homo sapiens
uaggaacuuaaa

SEQ ID NO: 52092 - RNA, 16 nt, Homo sapiens
uaggaagagaaaccag

SEQ ID NO: 52093 - RNA, 14 nt, Homo sapiens
uaggcuauucacaa

SEQ ID NO: 52094 - RNA, 12 nt, Homo sapiens
uagggaccugcu

SEQ ID NO: 52095 - RNA, 13 nt, Homo sapiens
uagggaccugcug

SEQ ID NO: 52096 - RNA, 14 nt, Homo sapiens
uagggaccugcugu

SEQ ID NO: 52097 - RNA, 23 nt, Homo sapiens
uaggugcuacaaaaacacagcaa

SEQ ID NO: 52098 - RNA, 23 nt, Homo sapiens
uagguuuggacaaaauggaauac

SEQ ID NO: 52099 - RNA, 23 nt, Homo sapiens
uaguaaugugacuuggauucaau

SEQ ID NO: 52100 - RNA, 17 nt, Homo sapiens
uaguaugaggcauuugu

SEQ ID NO: 52101 - RNA, 16 nt, Homo sapiens
uaguaugugcauuuaa

SEQ ID NO: 52102 - RNA, 23 nt, Homo sapiens
uagucacuaguuguaauuuuuuu

SEQ ID NO: 52103 - RNA, 13 nt, Homo sapiens
uagucucuaucau

SEQ ID NO: 52104 - RNA, 17 nt, Homo sapiens
uagucucuaucauuaaa

SEQ ID NO: 52105 - RNA, 18 nt, Homo sapiens
uagucucuaucauuaaag

SEQ ID NO: 52106 - RNA, 19 nt, Homo sapiens
uagugaaguaugcacuaau

SEQ ID NO: 52107 - RNA, 21 nt, Homo sapiens
uaguguuggaaaaugugcaau

SEQ ID NO: 52108 - RNA, 22 nt, Homo sapiens
uaguguuggagaagaacugaaa

SEQ ID NO: 52109 - RNA, 18 nt, Homo sapiens
uaguuacuaaacauguau

SEQ ID NO: 52110 - RNA, 13 nt, Homo sapiens
uaguuagcuuucu

SEQ ID NO: 52111 - RNA, 19 nt, Homo sapiens
uaguucaaucuggauucau

SEQ ID NO: 52112 - RNA, 12 nt, Homo sapiens
uaguugcuguau

SEQ ID NO: 52113 - RNA, 22 nt, Homo sapiens
uaguuguaauuuuuuuguggga

SEQ ID NO: 52114 - RNA, 19 nt, Homo sapiens
uaguuuuacaguguuucug

SEQ ID NO: 52115 - RNA, 13 nt, Homo sapiens
uauaaaauaauuu

SEQ ID NO: 52116 - RNA, 21 nt, Homo sapiens
uauaaauuuaucauuuaguua

SEQ ID NO: 52117 - RNA, 23 nt, Homo sapiens
uauaaauuuucccaaaacugaua

SEQ ID NO: 52118 - RNA, 17 nt, Homo sapiens
uauaauuuaaacgugau

SEQ ID NO: 52119 - RNA, 13 nt, Homo sapiens
uauaauuuuguga

SEQ ID NO: 52120 - RNA, 23 nt, Homo sapiens
uauaauuuugugaagcaaaauuu

SEQ ID NO: 52121 - RNA, 17 nt, Homo sapiens
uauacauaaacaagacc

SEQ ID NO: 52122 - RNA, 14 nt, Homo sapiens
uauagacucuagga

SEQ ID NO: 52123 - RNA, 21 nt, Homo sapiens
uauagauucuuuauuagugaa

SEQ ID NO: 52124 - RNA, 14 nt, Homo sapiens
uauagcuuucauaa

SEQ ID NO: 52125 - RNA, 21 nt, Homo sapiens
uauagugucuugggaauuuuc

SEQ ID NO: 52126 - RNA, 20 nt, Homo sapiens
uauaguuacccaaauuaaga

SEQ ID NO: 52127 - RNA, 17 nt, Homo sapiens
uauauaugugaugaucu

SEQ ID NO: 52128 - RNA, 19 nt, Homo sapiens
uauaucaguccucuuucaa

SEQ ID NO: 52129 - RNA, 14 nt, Homo sapiens
uauauccugugacu

SEQ ID NO: 52130 - RNA, 14 nt, Homo sapiens
uauaucuauauuuu

SEQ ID NO: 52131 - RNA, 18 nt, Homo sapiens
uauaugugaugaucuacc

SEQ ID NO: 52132 - RNA, 15 nt, Homo sapiens
uaucaauaucuaaua

SEQ ID NO: 52133 - RNA, 16 nt, Homo sapiens
uaucaauccaagaacu

SEQ ID NO: 52134 - RNA, 13 nt, Homo sapiens
uaucaguccaaag

SEQ ID NO: 52135 - RNA, 18 nt, Homo sapiens
uaucccaaccucucccaa

SEQ ID NO: 52136 - RNA, 23 nt, Homo sapiens
uauccuaauaaaaaggugaccau

SEQ ID NO: 52137 - RNA, 18 nt, Homo sapiens
uauccuccaugaauauca

SEQ ID NO: 52138 - RNA, 18 nt, Homo sapiens
uaucgccaucacagcuga

SEQ ID NO: 52139 - RNA, 19 nt, Homo sapiens
uaucgccaucacagcugaa

SEQ ID NO: 52140 - RNA, 19 nt, Homo sapiens
uaucuaauauauaugaaua

SEQ ID NO: 52141 - RNA, 16 nt, Homo sapiens
uaucuauguagaauau

SEQ ID NO: 52142 - RNA, 16 nt, Homo sapiens
uaucugcuaugcuauu

SEQ ID NO: 52143 - RNA, 15 nt, Homo sapiens
uaucuucacuuuuau

SEQ ID NO: 52144 - RNA, 20 nt, Homo sapiens
uaucuuguuuuuccacuacu

SEQ ID NO: 52145 - RNA, 15 nt, Homo sapiens
uaugaaaaugucauu

SEQ ID NO: 52146 - RNA, 22 nt, Homo sapiens
uaugaaacuuuuggaagguauu

SEQ ID NO: 52147 - RNA, 21 nt, Homo sapiens
uaugagaaucagaucauuuca

SEQ ID NO: 52148 - RNA, 22 nt, Homo sapiens
uaugaggcauuuguuugaacug

SEQ ID NO: 52149 - RNA, 17 nt, Homo sapiens
uaugauuccaccuacau

SEQ ID NO: 52150 - RNA, 23 nt, Homo sapiens
uaugcaaccuuuggaugcacuuu

SEQ ID NO: 52151 - RNA, 18 nt, Homo sapiens
uaugcacacauuuuuuaa

SEQ ID NO: 52152 - RNA, 12 nt, Homo sapiens
uaugcacuaauc

SEQ ID NO: 52153 - RNA, 14 nt, Homo sapiens
uaugcauacaguaa

SEQ ID NO: 52154 - RNA, 11 nt, Homo sapiens
uaugcauuuga

SEQ ID NO: 52155 - RNA, 15 nt, Homo sapiens
uaugccuuuucccaa

SEQ ID NO: 52156 - RNA, 15 nt, Homo sapiens
uaugcuaagugaaau

SEQ ID NO: 52157 - RNA, 18 nt, Homo sapiens
uaugcuauugaaguuuug

SEQ ID NO: 52158 - RNA, 21 nt, Homo sapiens
uaugcuauuuauuaaguauuu

SEQ ID NO: 52159 - RNA, 20 nt, Homo sapiens
uauggcacuaguauuucuau

SEQ ID NO: 52160 - RNA, 16 nt, Homo sapiens
uauggcuuaaugacac

SEQ ID NO: 52161 - RNA, 17 nt, Homo sapiens
uauggcuuuugugcauu

SEQ ID NO: 52162 - RNA, 20 nt, Homo sapiens
uauggcuuuugugcauuauc

SEQ ID NO: 52163 - RNA, 21 nt, Homo sapiens
uauguaaauagcuaagauaua

SEQ ID NO: 52164 - RNA, 12 nt, Homo sapiens
uauguaauuaua

SEQ ID NO: 52165 - RNA, 24 nt, Homo sapiens
uaugucauuugcuggagcucugcc

SEQ ID NO: 52166 - RNA, 14 nt, Homo sapiens
uaugugauguggca

SEQ ID NO: 52167 - RNA, 9 nt, Homo sapiens
uaugugcaa

SEQ ID NO: 52168 - RNA, 10 nt, Homo sapiens
uaugugcaau

SEQ ID NO: 52169 - RNA, 11 nt, Homo sapiens
uaugugcaaua

SEQ ID NO: 52170 - RNA, 12 nt, Homo sapiens
uaugugcacauc

SEQ ID NO: 52171 - RNA, 15 nt, Homo sapiens
uaugugcacaucugu

SEQ ID NO: 52172 - RNA, 15 nt, Homo sapiens
uaugugcauauuuua

SEQ ID NO: 52173 - RNA, 15 nt, Homo sapiens
uauguucuaagaagu

SEQ ID NO: 52174 - RNA, 15 nt, Homo sapiens
uauuaaagaucugca

SEQ ID NO: 52175 - RNA, 17 nt, Homo sapiens
uauuaauauuuaacauu

SEQ ID NO: 52176 - RNA, 12 nt, Homo sapiens
uauuacaucuuu

SEQ ID NO: 52177 - RNA, 15 nt, Homo sapiens
uauuacgugcaauac

SEQ ID NO: 52178 - RNA, 16 nt, Homo sapiens
uauuacgugcaauacu

SEQ ID NO: 52179 - RNA, 21 nt, Homo sapiens
uauuauuuuagagcaucucau

SEQ ID NO: 52180 - RNA, 15 nt, Homo sapiens
uauucauuaguuuug

SEQ ID NO: 52181 - RNA, 16 nt, Homo sapiens
uauucccuuuugcugc

SEQ ID NO: 52182 - RNA, 22 nt, Homo sapiens
uauugaaaugauuucacagugu

SEQ ID NO: 52183 - RNA, 17 nt, Homo sapiens
uauugaagcauuuuaua

SEQ ID NO: 52184 - RNA, 16 nt, Homo sapiens
uauugagcaccugcag

SEQ ID NO: 52185 - RNA, 16 nt, Homo sapiens
uauugaggcuuuaaaa

SEQ ID NO: 52186 - RNA, 20 nt, Homo sapiens
uauugauguuuucacaaaga

SEQ ID NO: 52187 - RNA, 22 nt, Homo sapiens
uauugauuuccguuaaaauacc

SEQ ID NO: 52188 - RNA, 17 nt, Homo sapiens
uauugcugaaugacuac

SEQ ID NO: 52189 - RNA, 13 nt, Homo sapiens
uauuggacuucca

SEQ ID NO: 52190 - RNA, 20 nt, Homo sapiens
uauuguagcauccuggaaua

SEQ ID NO: 52191 - RNA, 18 nt, Homo sapiens
uauugucuagugaaacuc

SEQ ID NO: 52192 - RNA, 18 nt, Homo sapiens
uauuguugacaacuguga

SEQ ID NO: 52193 - RNA, 16 nt, Homo sapiens
uauuguuugcuaagca

SEQ ID NO: 52194 - RNA, 18 nt, Homo sapiens
uauuuaaagacaaagaca

SEQ ID NO: 52195 - RNA, 19 nt, Homo sapiens
uauuuaaccucuaaauucu

SEQ ID NO: 52196 - RNA, 22 nt, Homo sapiens
uauuuacggaacucaaauacgu

SEQ ID NO: 52197 - RNA, 21 nt, Homo sapiens
uauuuacugagcuucucugug

SEQ ID NO: 52198 - RNA, 15 nt, Homo sapiens
uauuuauaaucacuu

SEQ ID NO: 52199 - RNA, 22 nt, Homo sapiens
uauuuauugaaaugauuucaca

SEQ ID NO: 52200 - RNA, 13 nt, Homo sapiens
uauuuauuuacug

SEQ ID NO: 52201 - RNA, 13 nt, Homo sapiens
uauuuauuuguuu

SEQ ID NO: 52202 - RNA, 13 nt, Homo sapiens
uauuucacuuuag

SEQ ID NO: 52203 - RNA, 19 nt, Homo sapiens
uauuucagauaaucacaau

SEQ ID NO: 52204 - RNA, 12 nt, Homo sapiens
uauuucauuucu

SEQ ID NO: 52205 - RNA, 13 nt, Homo sapiens
uauuucauuucuu

SEQ ID NO: 52206 - RNA, 22 nt, Homo sapiens
uauuuccauauuaaaaucacaa

SEQ ID NO: 52207 - RNA, 10 nt, Homo sapiens
uauuugagac

SEQ ID NO: 52208 - RNA, 20 nt, Homo sapiens
uauuuguacaccaauauuca

SEQ ID NO: 52209 - RNA, 18 nt, Homo sapiens
uauuuuaauaauguuuca

SEQ ID NO: 52210 - RNA, 19 nt, Homo sapiens
uauuuuaauaauguuucaa

SEQ ID NO: 52211 - RNA, 13 nt, Homo sapiens
uauuuuaaucacc

SEQ ID NO: 52212 - RNA, 17 nt, Homo sapiens
uauuuuagagcaucuca

SEQ ID NO: 52213 - RNA, 18 nt, Homo sapiens
uauuuuagagcaucucau

SEQ ID NO: 52214 - RNA, 13 nt, Homo sapiens
uauuuuaggucaa

SEQ ID NO: 52215 - RNA, 14 nt, Homo sapiens
uauuuucaugcugu

SEQ ID NO: 52216 - RNA, 14 nt, Homo sapiens
uauuuuuaugugca

SEQ ID NO: 52217 - RNA, 15 nt, Homo sapiens
uauuuuuaugugcaa

SEQ ID NO: 52218 - RNA, 17 nt, Homo sapiens
uauuuuuuucugaaauu

SEQ ID NO: 52219 - RNA, 12 nt, Homo sapiens
ucaaaacugcac

SEQ ID NO: 52220 - RNA, 17 nt, Homo sapiens
ucaaaacugcacuguca

SEQ ID NO: 52221 - RNA, 22 nt, Homo sapiens
ucaaaagguauuuauugagcac

SEQ ID NO: 52222 - RNA, 22 nt, Homo sapiens
ucaaaauaccaugccauuuaaa

SEQ ID NO: 52223 - RNA, 14 nt, Homo sapiens
ucaaacauauauaa

SEQ ID NO: 52224 - RNA, 21 nt, Homo sapiens
ucaaacccaaguuaguucaau

SEQ ID NO: 52225 - RNA, 22 nt, Homo sapiens
ucaaacccaaguuaguucaauc

SEQ ID NO: 52226 - RNA, 16 nt, Homo sapiens
ucaaagauagggaggg

SEQ ID NO: 52227 - RNA, 20 nt, Homo sapiens
ucaaagauauuuugcuuugu

SEQ ID NO: 52228 - RNA, 18 nt, Homo sapiens
ucaaaguuaagaaucuuu

SEQ ID NO: 52229 - RNA, 20 nt, Homo sapiens
ucaaaguuaagaaucuuuau

SEQ ID NO: 52230 - RNA, 14 nt, Homo sapiens
ucaaauaugcaaag

SEQ ID NO: 52231 - RNA, 21 nt, Homo sapiens
ucaaauaugcaaagcacugac

SEQ ID NO: 52232 - RNA, 18 nt, Homo sapiens
ucaaauguucuccaguca

SEQ ID NO: 52233 - RNA, 13 nt, Homo sapiens
ucaaauuccagaa

SEQ ID NO: 52234 - RNA, 15 nt, Homo sapiens
ucaaccaccuuucag

SEQ ID NO: 52235 - RNA, 14 nt, Homo sapiens
ucaacucauauuuu

SEQ ID NO: 52236 - RNA, 19 nt, Homo sapiens
ucaagaugaugaugaucuu

SEQ ID NO: 52237 - RNA, 14 nt, Homo sapiens
ucaagccugccuca

SEQ ID NO: 52238 - RNA, 11 nt, Homo sapiens
ucaauaaaacu

SEQ ID NO: 52239 - RNA, 12 nt, Homo sapiens
ucaauaaaacuu

SEQ ID NO: 52240 - RNA, 16 nt, Homo sapiens
ucaauacuuugaacac

SEQ ID NO: 52241 - RNA, 10 nt, Homo sapiens
ucaauauuua

SEQ ID NO: 52242 - RNA, 22 nt, Homo sapiens
ucaauauuuauuauuuucaccu

SEQ ID NO: 52243 - RNA, 23 nt, Homo sapiens
ucaauauuuauuauuuucaccug

SEQ ID NO: 52244 - RNA, 14 nt, Homo sapiens
ucaauauuucagau

SEQ ID NO: 52245 - RNA, 18 nt, Homo sapiens
ucaaucagccuaguugau

SEQ ID NO: 52246 - RNA, 16 nt, Homo sapiens
ucaaucaguauucaua

SEQ ID NO: 52247 - RNA, 17 nt, Homo sapiens
ucaauccaagaacuuau

SEQ ID NO: 52248 - RNA, 16 nt, Homo sapiens
ucaaugaaugaaugaa

SEQ ID NO: 52249 - RNA, 11 nt, Homo sapiens
ucaaugcagcc

SEQ ID NO: 52250 - RNA, 17 nt, Homo sapiens
ucaaugccccugaauuu

SEQ ID NO: 52251 - RNA, 19 nt, Homo sapiens
ucaauguuuagcagauuua

SEQ ID NO: 52252 - RNA, 21 nt, Homo sapiens
ucaauucuauuacgugcaaua

SEQ ID NO: 52253 - RNA, 20 nt, Homo sapiens
ucaauuuuaaggcauauuua

SEQ ID NO: 52254 - RNA, 19 nt, Homo sapiens
ucacaaaaguauauucaaa

SEQ ID NO: 52255 - RNA, 15 nt, Homo sapiens
ucacaaacucaucca

SEQ ID NO: 52256 - RNA, 20 nt, Homo sapiens
ucacaaacucauccauuaau

SEQ ID NO: 52257 - RNA, 19 nt, Homo sapiens
ucacaaaucuuaacuugaa

SEQ ID NO: 52258 - RNA, 23 nt, Homo sapiens
ucacaaaucuuaacuugaaggag

SEQ ID NO: 52259 - RNA, 23 nt, Homo sapiens
ucacaacagauuauuaccuuaca

SEQ ID NO: 52260 - RNA, 19 nt, Homo sapiens
ucacaaccacucauucaaa

SEQ ID NO: 52261 - RNA, 14 nt, Homo sapiens
ucacaagcacuuuc

SEQ ID NO: 52262 - RNA, 20 nt, Homo sapiens
ucacagauaccucucuugua

SEQ ID NO: 52263 - RNA, 22 nt, Homo sapiens
ucacaggaaguagaggaggcca

SEQ ID NO: 52264 - RNA, 15 nt, Homo sapiens
ucacagguugaccaa

SEQ ID NO: 52265 - RNA, 16 nt, Homo sapiens
ucacagguugaccaau

SEQ ID NO: 52266 - RNA, 20 nt, Homo sapiens
ucacaguuuugguugcuuua

SEQ ID NO: 52267 - RNA, 21 nt, Homo sapiens
ucacaguuuugguugcuuuaa

SEQ ID NO: 52268 - RNA, 23 nt, Homo sapiens
ucacauuccaagccucaugucca

SEQ ID NO: 52269 - RNA, 23 nt, Homo sapiens
ucacauuggcuauuuaaagacaa

SEQ ID NO: 52270 - RNA, 11 nt, Homo sapiens
ucacauuugcg

SEQ ID NO: 52271 - RNA, 23 nt, Homo sapiens
ucaccugugagaccaaauugagc

SEQ ID NO: 52272 - RNA, 10 nt, Homo sapiens
ucaccuguuu

SEQ ID NO: 52273 - RNA, 14 nt, Homo sapiens
ucaccuuccagugu

SEQ ID NO: 52274 - RNA, 14 nt, Homo sapiens
ucacuggcuguuaa

SEQ ID NO: 52275 - RNA, 15 nt, Homo sapiens
ucacuggcuguuaau

SEQ ID NO: 52276 - RNA, 20 nt, Homo sapiens
ucacuggcuguuaaucuuuc

SEQ ID NO: 52277 - RNA, 11 nt, Homo sapiens
ucacuugauga

SEQ ID NO: 52278 - RNA, 13 nt, Homo sapiens
ucacuugaugaua

SEQ ID NO: 52279 - RNA, 12 nt, Homo sapiens
ucacuuguuuua

SEQ ID NO: 52280 - RNA, 13 nt, Homo sapiens
ucacuuguuuuau

SEQ ID NO: 52281 - RNA, 15 nt, Homo sapiens
ucacuuuuauaagaa

SEQ ID NO: 52282 - RNA, 23 nt, Homo sapiens
ucacuuuuuuucuuuucucugcc

SEQ ID NO: 52283 - RNA, 16 nt, Homo sapiens
ucagaaaacaaggaug

SEQ ID NO: 52284 - RNA, 17 nt, Homo sapiens
ucagaaauguguuauca

SEQ ID NO: 52285 - RNA, 23 nt, Homo sapiens
ucagaaauuuaauucauguuucu

SEQ ID NO: 52286 - RNA, 16 nt, Homo sapiens
ucagaagaaauucugc

SEQ ID NO: 52287 - RNA, 23 nt, Homo sapiens
ucagauauaaaagacugaccaau

SEQ ID NO: 52288 - RNA, 22 nt, Homo sapiens
ucagcaccuacaguguacaguc

SEQ ID NO: 52289 - RNA, 17 nt, Homo sapiens
ucagcagagaaguuuuc

SEQ ID NO: 52290 - RNA, 13 nt, Homo sapiens
ucagccacuguga

SEQ ID NO: 52291 - RNA, 13 nt, Homo sapiens
ucagccagcccuc

SEQ ID NO: 52292 - RNA, 13 nt, Homo sapiens
ucagccccgggag

SEQ ID NO: 52293 - RNA, 19 nt, Homo sapiens
ucagccccgggaguggcgc

SEQ ID NO: 52294 - RNA, 21 nt, Homo sapiens
ucagccccgggaguggcgcgc

SEQ ID NO: 52295 - RNA, 23 nt, Homo sapiens
ucagccccgggaguggcgcgcgc

SEQ ID NO: 52296 - RNA, 21 nt, Homo sapiens
ucagccugaaagaggaaugaa

SEQ ID NO: 52297 - RNA, 22 nt, Homo sapiens
ucagccugaaagaggaaugaag

SEQ ID NO: 52298 - RNA, 15 nt, Homo sapiens
ucagcuacaauugua

SEQ ID NO: 52299 - RNA, 21 nt, Homo sapiens
ucagcucagcuaaugaagugu

SEQ ID NO: 52300 - RNA, 19 nt, Homo sapiens
ucagcucucaguugcagcc

SEQ ID NO: 52301 - RNA, 24 nt, Homo sapiens
ucagcucucaguugcagcccugcu

SEQ ID NO: 52302 - RNA, 22 nt, Homo sapiens
ucaggaaaucaaauaugcaaag

SEQ ID NO: 52303 - RNA, 17 nt, Homo sapiens
ucaggaguuccuaacca

SEQ ID NO: 52304 - RNA, 18 nt, Homo sapiens
ucaggaguuccuaaccag

SEQ ID NO: 52305 - RNA, 15 nt, Homo sapiens
ucaggaugcccacgg

SEQ ID NO: 52306 - RNA, 16 nt, Homo sapiens
ucaggaugcccacggc

SEQ ID NO: 52307 - RNA, 22 nt, Homo sapiens
ucaggcuagauguauguacuuc

SEQ ID NO: 52308 - RNA, 15 nt, Homo sapiens
ucaggcuggcaccgc

SEQ ID NO: 52309 - RNA, 21 nt, Homo sapiens
ucaggcuggcaccgcuguacg

SEQ ID NO: 52310 - RNA, 11 nt, Homo sapiens
ucaggcuggcc

SEQ ID NO: 52311 - RNA, 15 nt, Homo sapiens
ucagggagcauuuau

SEQ ID NO: 52312 - RNA, 16 nt, Homo sapiens
ucaggugacccugaug

SEQ ID NO: 52313 - RNA, 20 nt, Homo sapiens
ucaggugacccugaugaaaa

SEQ ID NO: 52314 - RNA, 18 nt, Homo sapiens
ucaguccaugaagaugua

SEQ ID NO: 52315 - RNA, 14 nt, Homo sapiens
ucaguccucuuuca

SEQ ID NO: 52316 - RNA, 13 nt, Homo sapiens
ucaguuauuuuua

SEQ ID NO: 52317 - RNA, 23 nt, Homo sapiens
ucaguuguuauuuauugaaauga

SEQ ID NO: 52318 - RNA, 15 nt, Homo sapiens
ucauaagaauucugu

SEQ ID NO: 52319 - RNA, 16 nt, Homo sapiens
ucauaauaaauaucua

SEQ ID NO: 52320 - RNA, 13 nt, Homo sapiens
ucauauuuaauuu

SEQ ID NO: 52321 - RNA, 16 nt, Homo sapiens
ucauauuuaauuugaa

SEQ ID NO: 52322 - RNA, 16 nt, Homo sapiens
ucauauuuauagccag

SEQ ID NO: 52323 - RNA, 12 nt, Homo sapiens
ucauauuuucau

SEQ ID NO: 52324 - RNA, 15 nt, Homo sapiens
ucaucaaugaaugaa

SEQ ID NO: 52325 - RNA, 16 nt, Homo sapiens
ucaucaaugaaugaau

SEQ ID NO: 52326 - RNA, 14 nt, Homo sapiens
ucaucacccagcac

SEQ ID NO: 52327 - RNA, 14 nt, Homo sapiens
ucauccacuuucca

SEQ ID NO: 52328 - RNA, 15 nt, Homo sapiens
ucauccacuuuccaa

SEQ ID NO: 52329 - RNA, 13 nt, Homo sapiens
ucaucccacccgc

SEQ ID NO: 52330 - RNA, 21 nt, Homo sapiens
ucaucuguaaaauggagacac

SEQ ID NO: 52331 - RNA, 23 nt, Homo sapiens
ucaucugugauucccuccugcua

SEQ ID NO: 52332 - RNA, 18 nt, Homo sapiens
ucaucuuggucacauaca

SEQ ID NO: 52333 - RNA, 19 nt, Homo sapiens
ucaucuuggucacauacaa

SEQ ID NO: 52334 - RNA, 14 nt, Homo sapiens
ucaugaaggggcgg

SEQ ID NO: 52335 - RNA, 15 nt, Homo sapiens
ucaugaaggggcggc

SEQ ID NO: 52336 - RNA, 20 nt, Homo sapiens
ucaugaaggggcggcggccc

SEQ ID NO: 52337 - RNA, 12 nt, Homo sapiens
ucaugaauuagu

SEQ ID NO: 52338 - RNA, 19 nt, Homo sapiens
ucaugaauuaguuuuauau

SEQ ID NO: 52339 - RNA, 16 nt, Homo sapiens
ucaugcaaaugcugua

SEQ ID NO: 52340 - RNA, 14 nt, Homo sapiens
ucaugcauuugcac

SEQ ID NO: 52341 - RNA, 12 nt, Homo sapiens
ucaugcugccaa

SEQ ID NO: 52342 - RNA, 13 nt, Homo sapiens
ucauguacaucca

SEQ ID NO: 52343 - RNA, 14 nt, Homo sapiens
ucauguugaaacuu

SEQ ID NO: 52344 - RNA, 13 nt, Homo sapiens
ucauuaaaguucu

SEQ ID NO: 52345 - RNA, 15 nt, Homo sapiens
ucauuaaaguucuag

SEQ ID NO: 52346 - RNA, 19 nt, Homo sapiens
ucauuaaaguucuagugac

SEQ ID NO: 52347 - RNA, 22 nt, Homo sapiens
ucauuaaaguucuagugaccga

SEQ ID NO: 52348 - RNA, 21 nt, Homo sapiens
ucauuaaauggaaguaaaugu

SEQ ID NO: 52349 - RNA, 22 nt, Homo sapiens
ucauuaaauggaaguaaauguu

SEQ ID NO: 52350 - RNA, 17 nt, Homo sapiens
ucauuaauaauaaauuc

SEQ ID NO: 52351 - RNA, 18 nt, Homo sapiens
ucauuaguuuugaagauu

SEQ ID NO: 52352 - RNA, 19 nt, Homo sapiens
ucauuaucucaaaacugca

SEQ ID NO: 52353 - RNA, 20 nt, Homo sapiens
ucauuaucucaaaacugcac

SEQ ID NO: 52354 - RNA, 14 nt, Homo sapiens
ucauuauguuaaua

SEQ ID NO: 52355 - RNA, 20 nt, Homo sapiens
ucauucagauaugauucaaa

SEQ ID NO: 52356 - RNA, 15 nt, Homo sapiens
ucauucugccugccc

SEQ ID NO: 52357 - RNA, 17 nt, Homo sapiens
ucauucuuuuugaaaug

SEQ ID NO: 52358 - RNA, 21 nt, Homo sapiens
ucauucuuuuugaaaugucaa

SEQ ID NO: 52359 - RNA, 16 nt, Homo sapiens
ucauugcaaccuccac

SEQ ID NO: 52360 - RNA, 22 nt, Homo sapiens
ucauuguucuugugaacccaaa

SEQ ID NO: 52361 - RNA, 13 nt, Homo sapiens
ucauuuauuucca

SEQ ID NO: 52362 - RNA, 13 nt, Homo sapiens
ucauuuccaagca

SEQ ID NO: 52363 - RNA, 21 nt, Homo sapiens
ucauuuccuauguaacugcau

SEQ ID NO: 52364 - RNA, 20 nt, Homo sapiens
ucauuuuaaaaaauggaaca

SEQ ID NO: 52365 - RNA, 15 nt, Homo sapiens
ucauuuuuuuuaaga

SEQ ID NO: 52366 - RNA, 22 nt, Homo sapiens
uccaaacugacucuuaagaaga

SEQ ID NO: 52367 - RNA, 21 nt, Homo sapiens
uccaaagaaauguaagggaaa

SEQ ID NO: 52368 - RNA, 22 nt, Homo sapiens
uccaaagcugaauacauucugc

SEQ ID NO: 52369 - RNA, 14 nt, Homo sapiens
uccaaauucacaag

SEQ ID NO: 52370 - RNA, 19 nt, Homo sapiens
uccaacuaucucauuucca

SEQ ID NO: 52371 - RNA, 14 nt, Homo sapiens
uccaagcaaguauu

SEQ ID NO: 52372 - RNA, 14 nt, Homo sapiens
uccaagcauaccaa

SEQ ID NO: 52373 - RNA, 22 nt, Homo sapiens
uccaagcauaccaacacgagca

SEQ ID NO: 52374 - RNA, 16 nt, Homo sapiens
uccaagccucaugucc

SEQ ID NO: 52375 - RNA, 22 nt, Homo sapiens
uccaauaaagaguuccuucugc

SEQ ID NO: 52376 - RNA, 24 nt, Homo sapiens
uccaauuaaggauuuuaugcuuua

SEQ ID NO: 52377 - RNA, 19 nt, Homo sapiens
uccacauccugugggaccu

SEQ ID NO: 52378 - RNA, 17 nt, Homo sapiens
uccaccuuacuucuucu

SEQ ID NO: 52379 - RNA, 13 nt, Homo sapiens
uccacuacugcua

SEQ ID NO: 52380 - RNA, 16 nt, Homo sapiens
uccacuuuccaauaaa

SEQ ID NO: 52381 - RNA, 12 nt, Homo sapiens
uccagcugcccc

SEQ ID NO: 52382 - RNA, 14 nt, Homo sapiens
uccagcugccccgg

SEQ ID NO: 52383 - RNA, 15 nt, Homo sapiens
uccagcugccccggg

SEQ ID NO: 52384 - RNA, 17 nt, Homo sapiens
uccagcugccccgggga

SEQ ID NO: 52385 - RNA, 17 nt, Homo sapiens
uccagggcuacgcgcgc

SEQ ID NO: 52386 - RNA, 19 nt, Homo sapiens
uccagggcuacgcgcgcuc

SEQ ID NO: 52387 - RNA, 20 nt, Homo sapiens
uccagggcuacgcgcgcucc

SEQ ID NO: 52388 - RNA, 21 nt, Homo sapiens
uccagggcuacgcgcgcuccg

SEQ ID NO: 52389 - RNA, 18 nt, Homo sapiens
uccagguuccugagcccu

SEQ ID NO: 52390 - RNA, 19 nt, Homo sapiens
uccagugagacagcucugc

SEQ ID NO: 52391 - RNA, 20 nt, Homo sapiens
uccagugagacagcucugca

SEQ ID NO: 52392 - RNA, 18 nt, Homo sapiens
uccauggcccugccaugc

SEQ ID NO: 52393 - RNA, 16 nt, Homo sapiens
uccauggggugggggu

SEQ ID NO: 52394 - RNA, 14 nt, Homo sapiens
uccauuaaauauaa

SEQ ID NO: 52395 - RNA, 16 nt, Homo sapiens
uccauuaaauauaaag

SEQ ID NO: 52396 - RNA, 19 nt, Homo sapiens
uccauugguuuaccuguga

SEQ ID NO: 52397 - RNA, 16 nt, Homo sapiens
ucccaaaacugauacc

SEQ ID NO: 52398 - RNA, 19 nt, Homo sapiens
ucccaaauuucauaccuau

SEQ ID NO: 52399 - RNA, 21 nt, Homo sapiens
ucccaaauuucauaccuauca

SEQ ID NO: 52400 - RNA, 12 nt, Homo sapiens
ucccacacuguc

SEQ ID NO: 52401 - RNA, 14 nt, Homo sapiens
ucccacacugucca

SEQ ID NO: 52402 - RNA, 13 nt, Homo sapiens
ucccacccgccca

SEQ ID NO: 52403 - RNA, 17 nt, Homo sapiens
ucccacccgcccaccgc

SEQ ID NO: 52404 - RNA, 18 nt, Homo sapiens
ucccacccgcccaccgca

SEQ ID NO: 52405 - RNA, 17 nt, Homo sapiens
ucccaccucccauucac

SEQ ID NO: 52406 - RNA, 20 nt, Homo sapiens
ucccagcacuuugggaggcu

SEQ ID NO: 52407 - RNA, 19 nt, Homo sapiens
ucccagcuacuugggaggc

SEQ ID NO: 52408 - RNA, 17 nt, Homo sapiens
ucccagcuagaauucac

SEQ ID NO: 52409 - RNA, 23 nt, Homo sapiens
ucccagcuagaauucacuccacu

SEQ ID NO: 52410 - RNA, 21 nt, Homo sapiens
ucccaggaaaauuaaggcuuc

SEQ ID NO: 52411 - RNA, 15 nt, Homo sapiens
ucccaggaggggcuu

SEQ ID NO: 52412 - RNA, 22 nt, Homo sapiens
ucccaggaggggcuucugggca

SEQ ID NO: 52413 - RNA, 22 nt, Homo sapiens
ucccauggguuguguguuuauu

SEQ ID NO: 52414 - RNA, 15 nt, Homo sapiens
ucccauucacagaua

SEQ ID NO: 52415 - RNA, 19 nt, Homo sapiens
ucccauucacagauaccuc

SEQ ID NO: 52416 - RNA, 16 nt, Homo sapiens
ucccauucaggaugcc

SEQ ID NO: 52417 - RNA, 15 nt, Homo sapiens
uccccagagcuacag

SEQ ID NO: 52418 - RNA, 17 nt, Homo sapiens
uccccagagcuacaggc

SEQ ID NO: 52419 - RNA, 16 nt, Homo sapiens
uccccagcuguuuaug

SEQ ID NO: 52420 - RNA, 16 nt, Homo sapiens
uccccaugauguuuag

SEQ ID NO: 52421 - RNA, 14 nt, Homo sapiens
uccccgaaacuacc

SEQ ID NO: 52422 - RNA, 13 nt, Homo sapiens
uccccucggagaa

SEQ ID NO: 52423 - RNA, 17 nt, Homo sapiens
uccccugucacgugugg

SEQ ID NO: 52424 - RNA, 15 nt, Homo sapiens
uccccuucccacacu

SEQ ID NO: 52425 - RNA, 17 nt, Homo sapiens
ucccgcuguuccucgcc

SEQ ID NO: 52426 - RNA, 19 nt, Homo sapiens
ucccgcuguuccucgccac

SEQ ID NO: 52427 - RNA, 12 nt, Homo sapiens
ucccggccgcgc

SEQ ID NO: 52428 - RNA, 14 nt, Homo sapiens
ucccggccgcgcug

SEQ ID NO: 52429 - RNA, 15 nt, Homo sapiens
ucccggccgcgcugc

SEQ ID NO: 52430 - RNA, 16 nt, Homo sapiens
ucccggccgcgcugcg

SEQ ID NO: 52431 - RNA, 17 nt, Homo sapiens
ucccggccgcgcugcgc

SEQ ID NO: 52432 - RNA, 20 nt, Homo sapiens
ucccggccgcgcugcgcgcc

SEQ ID NO: 52433 - RNA, 23 nt, Homo sapiens
ucccggccgcgcugcgcgccgcg

SEQ ID NO: 52434 - RNA, 24 nt, Homo sapiens
ucccggccgcgcugcgcgccgcgc

SEQ ID NO: 52435 - RNA, 12 nt, Homo sapiens
ucccggccggcg

SEQ ID NO: 52436 - RNA, 15 nt, Homo sapiens
ucccggccggcgcgc

SEQ ID NO: 52437 - RNA, 16 nt, Homo sapiens
ucccggccggcgcgcu

SEQ ID NO: 52438 - RNA, 22 nt, Homo sapiens
ucccuauuuuuuuucuguuaua

SEQ ID NO: 52439 - RNA, 19 nt, Homo sapiens
ucccucuaauuuaucuugu

SEQ ID NO: 52440 - RNA, 18 nt, Homo sapiens
ucccucuguugccaaggc

SEQ ID NO: 52441 - RNA, 22 nt, Homo sapiens
ucccucuguugccaaggcugga

SEQ ID NO: 52442 - RNA, 13 nt, Homo sapiens
ucccugagcagga

SEQ ID NO: 52443 - RNA, 15 nt, Homo sapiens
ucccugcagacauga

SEQ ID NO: 52444 - RNA, 16 nt, Homo sapiens
ucccugcagacaugag

SEQ ID NO: 52445 - RNA, 23 nt, Homo sapiens
ucccuggaagagaucaagccauc

SEQ ID NO: 52446 - RNA, 13 nt, Homo sapiens
ucccuuaccuggg

SEQ ID NO: 52447 - RNA, 14 nt, Homo sapiens
ucccuuaccuggga

SEQ ID NO: 52448 - RNA, 19 nt, Homo sapiens
ucccuucucuucacaguca

SEQ ID NO: 52449 - RNA, 15 nt, Homo sapiens
uccgaagucuuccau

SEQ ID NO: 52450 - RNA, 13 nt, Homo sapiens
uccgcauccuagu

SEQ ID NO: 52451 - RNA, 15 nt, Homo sapiens
uccgcauccuagucu

SEQ ID NO: 52452 - RNA, 12 nt, Homo sapiens
uccgcgcagcuc

SEQ ID NO: 52453 - RNA, 16 nt, Homo sapiens
uccgcgcagcucaggc

SEQ ID NO: 52454 - RNA, 18 nt, Homo sapiens
uccgcgcagcucaggcug

SEQ ID NO: 52455 - RNA, 19 nt, Homo sapiens
uccgcgcagcucaggcugg

SEQ ID NO: 52456 - RNA, 20 nt, Homo sapiens
uccgcgcagcucaggcuggc

SEQ ID NO: 52457 - RNA, 12 nt, Homo sapiens
uccgcuacuucc

SEQ ID NO: 52458 - RNA, 17 nt, Homo sapiens
uccgcuacuuccagggc

SEQ ID NO: 52459 - RNA, 18 nt, Homo sapiens
uccgcuacuuccagggcu

SEQ ID NO: 52460 - RNA, 21 nt, Homo sapiens
uccgcuauccaccaaaagggc

SEQ ID NO: 52461 - RNA, 12 nt, Homo sapiens
uccggacgcugc

SEQ ID NO: 52462 - RNA, 12 nt, Homo sapiens
uccgggucgcag

SEQ ID NO: 52463 - RNA, 20 nt, Homo sapiens
uccgggucgcaggaccaucc

SEQ ID NO: 52464 - RNA, 20 nt, Homo sapiens
uccguggcacugcauacaau

SEQ ID NO: 52465 - RNA, 17 nt, Homo sapiens
uccguuaaaauaccagc

SEQ ID NO: 52466 - RNA, 19 nt, Homo sapiens
uccuaacaggaauuuucau

SEQ ID NO: 52467 - RNA, 17 nt, Homo sapiens
uccuaagucccugcugc

SEQ ID NO: 52468 - RNA, 20 nt, Homo sapiens
uccuaauaaaaaggugacca

SEQ ID NO: 52469 - RNA, 21 nt, Homo sapiens
uccuagcgcagccaugugauu

SEQ ID NO: 52470 - RNA, 23 nt, Homo sapiens
uccuagcgcagccaugugauuac

SEQ ID NO: 52471 - RNA, 14 nt, Homo sapiens
uccuagucucuauc

SEQ ID NO: 52472 - RNA, 14 nt, Homo sapiens
uccuagugaaagag

SEQ ID NO: 52473 - RNA, 12 nt, Homo sapiens
uccuauauccug

SEQ ID NO: 52474 - RNA, 15 nt, Homo sapiens
uccuauguaacugca

SEQ ID NO: 52475 - RNA, 15 nt, Homo sapiens
uccuauuauauucau

SEQ ID NO: 52476 - RNA, 17 nt, Homo sapiens
uccuccaugaauaucag

SEQ ID NO: 52477 - RNA, 22 nt, Homo sapiens
uccuccaugaauaucaguuauu

SEQ ID NO: 52478 - RNA, 12 nt, Homo sapiens
uccucccggccg

SEQ ID NO: 52479 - RNA, 13 nt, Homo sapiens
uccucccggccgc

SEQ ID NO: 52480 - RNA, 14 nt, Homo sapiens
uccucccggccgcg

SEQ ID NO: 52481 - RNA, 16 nt, Homo sapiens
uccucccggccgcgcu

SEQ ID NO: 52482 - RNA, 21 nt, Homo sapiens
uccucccggccgcgcugcgcg

SEQ ID NO: 52483 - RNA, 12 nt, Homo sapiens
uccucgccacgc

SEQ ID NO: 52484 - RNA, 13 nt, Homo sapiens
uccucgccacgcu

SEQ ID NO: 52485 - RNA, 18 nt, Homo sapiens
uccucgccacgcucuggg

SEQ ID NO: 52486 - RNA, 12 nt, Homo sapiens
uccucggacggc

SEQ ID NO: 52487 - RNA, 22 nt, Homo sapiens
uccucggacggcuccggacgcu

SEQ ID NO: 52488 - RNA, 20 nt, Homo sapiens
uccucucaaccaccuuucag

SEQ ID NO: 52489 - RNA, 13 nt, Homo sapiens
uccugagaccagc

SEQ ID NO: 52490 - RNA, 15 nt, Homo sapiens
uccugagaccagcca

SEQ ID NO: 52491 - RNA, 17 nt, Homo sapiens
uccugagaccagccaac

SEQ ID NO: 52492 - RNA, 18 nt, Homo sapiens
uccugagaccagccaacc

SEQ ID NO: 52493 - RNA, 15 nt, Homo sapiens
uccugcaaugaaguc

SEQ ID NO: 52494 - RNA, 23 nt, Homo sapiens
uccugcuacucuguuccuucaca

SEQ ID NO: 52495 - RNA, 21 nt, Homo sapiens
uccuggauuccucacuuugaa

SEQ ID NO: 52496 - RNA, 17 nt, Homo sapiens
uccuguacuuuuuccag

SEQ ID NO: 52497 - RNA, 20 nt, Homo sapiens
uccugugacugucucacuua

SEQ ID NO: 52498 - RNA, 15 nt, Homo sapiens
uccuuaucacugaca

SEQ ID NO: 52499 - RNA, 15 nt, Homo sapiens
uccuucauggcaggc

SEQ ID NO: 52500 - RNA, 17 nt, Homo sapiens
uccuuccacuuccaaga

SEQ ID NO: 52501 - RNA, 19 nt, Homo sapiens
uccuuccacuuccaagauc

SEQ ID NO: 52502 - RNA, 14 nt, Homo sapiens
uccuuccuuaucac

SEQ ID NO: 52503 - RNA, 16 nt, Homo sapiens
uccuucucaucuguga

SEQ ID NO: 52504 - RNA, 15 nt, Homo sapiens
uccuucugcccugcu

SEQ ID NO: 52505 - RNA, 16 nt, Homo sapiens
uccuucugcccugcuu

SEQ ID NO: 52506 - RNA, 14 nt, Homo sapiens
ucgaacugcuggau

SEQ ID NO: 52507 - RNA, 22 nt, Homo sapiens
ucgaacugcuggauucaaguga

SEQ ID NO: 52508 - RNA, 17 nt, Homo sapiens
ucgagcguugcuggggg

SEQ ID NO: 52509 - RNA, 18 nt, Homo sapiens
ucgagcguugcugggggg

SEQ ID NO: 52510 - RNA, 21 nt, Homo sapiens
ucgauccccugucacgugugg

SEQ ID NO: 52511 - RNA, 20 nt, Homo sapiens
ucgcaggaccaucccggccg

SEQ ID NO: 52512 - RNA, 21 nt, Homo sapiens
ucgcaggaccaucccggccgg

SEQ ID NO: 52513 - RNA, 23 nt, Homo sapiens
ucgcaggaccaucccggccggcg

SEQ ID NO: 52514 - RNA, 14 nt, Homo sapiens
ucgccacgcucugg

SEQ ID NO: 52515 - RNA, 18 nt, Homo sapiens
ucgccacgcucugggucg

SEQ ID NO: 52516 - RNA, 23 nt, Homo sapiens
ucgccacgcucugggucgccggc

SEQ ID NO: 52517 - RNA, 17 nt, Homo sapiens
ucgccaucacagcugaa

SEQ ID NO: 52518 - RNA, 19 nt, Homo sapiens
ucgcccacuuccucccggc

SEQ ID NO: 52519 - RNA, 21 nt, Homo sapiens
ucgcccacuuccucccggccg

SEQ ID NO: 52520 - RNA, 22 nt, Homo sapiens
ucgcccacuuccucccggccgc

SEQ ID NO: 52521 - RNA, 11 nt, Homo sapiens
ucgcgcgccuc

SEQ ID NO: 52522 - RNA, 13 nt, Homo sapiens
ucgcgcgccuccg

SEQ ID NO: 52523 - RNA, 15 nt, Homo sapiens
ucgcgcgccuccgcu

SEQ ID NO: 52524 - RNA, 24 nt, Homo sapiens
ucgcugauauauguguuuuucaca

SEQ ID NO: 52525 - RNA, 19 nt, Homo sapiens
ucgcuuccgcauccuaguc

SEQ ID NO: 52526 - RNA, 20 nt, Homo sapiens
ucgcuuccgcauccuagucu

SEQ ID NO: 52527 - RNA, 17 nt, Homo sapiens
ucgcuuuugauaaucaa

SEQ ID NO: 52528 - RNA, 18 nt, Homo sapiens
ucgcuuuugauaaucaac

SEQ ID NO: 52529 - RNA, 13 nt, Homo sapiens
ucggacggcuccg

SEQ ID NO: 52530 - RNA, 14 nt, Homo sapiens
ucggacggcuccgg

SEQ ID NO: 52531 - RNA, 18 nt, Homo sapiens
ucggacggcuccggacgc

SEQ ID NO: 52532 - RNA, 20 nt, Homo sapiens
ucggacggcuccggacgcug

SEQ ID NO: 52533 - RNA, 12 nt, Homo sapiens
ucggccugcucg

SEQ ID NO: 52534 - RNA, 14 nt, Homo sapiens
ucggccugcucgcc

SEQ ID NO: 52535 - RNA, 15 nt, Homo sapiens
ucggccugcucgccc

SEQ ID NO: 52536 - RNA, 16 nt, Homo sapiens
ucggccugcucgccca

SEQ ID NO: 52537 - RNA, 17 nt, Homo sapiens
ucggccugcucgcccac

SEQ ID NO: 52538 - RNA, 12 nt, Homo sapiens
ucuaaaugucaa

SEQ ID NO: 52539 - RNA, 16 nt, Homo sapiens
ucuaaauucuuucauu

SEQ ID NO: 52540 - RNA, 12 nt, Homo sapiens
ucuaacucagaa

SEQ ID NO: 52541 - RNA, 13 nt, Homo sapiens
ucuaacucagaaa

SEQ ID NO: 52542 - RNA, 18 nt, Homo sapiens
ucuaacucagaaacauca

SEQ ID NO: 52543 - RNA, 19 nt, Homo sapiens
ucuaaguaaaaccacagca

SEQ ID NO: 52544 - RNA, 16 nt, Homo sapiens
ucuacaaaauauagcu

SEQ ID NO: 52545 - RNA, 16 nt, Homo sapiens
ucuacauacuauggaa

SEQ ID NO: 52546 - RNA, 14 nt, Homo sapiens
ucuaccaaaaaucu

SEQ ID NO: 52547 - RNA, 17 nt, Homo sapiens
ucuaccuguucgcgcgc

SEQ ID NO: 52548 - RNA, 18 nt, Homo sapiens
ucuaccuguucgcgcgcc

SEQ ID NO: 52549 - RNA, 19 nt, Homo sapiens
ucuaccuguucgcgcgccu

SEQ ID NO: 52550 - RNA, 23 nt, Homo sapiens
ucuaccuguucgcgcgccuccgc

SEQ ID NO: 52551 - RNA, 15 nt, Homo sapiens
ucuagaauacuaaua

SEQ ID NO: 52552 - RNA, 16 nt, Homo sapiens
ucuagauacuguauca

SEQ ID NO: 52553 - RNA, 21 nt, Homo sapiens
ucuagcaaauguuaugcauaa

SEQ ID NO: 52554 - RNA, 13 nt, Homo sapiens
ucuaggccgggcg

SEQ ID NO: 52555 - RNA, 14 nt, Homo sapiens
ucuaggccgggcgc

SEQ ID NO: 52556 - RNA, 17 nt, Homo sapiens
ucuaggccgggcgcggu

SEQ ID NO: 52557 - RNA, 19 nt, Homo sapiens
ucuaguuugauuaaauucu

SEQ ID NO: 52558 - RNA, 20 nt, Homo sapiens
ucuauaaaccgaacugaugu

SEQ ID NO: 52559 - RNA, 22 nt, Homo sapiens
ucuaucauuaaaguucuaguga

SEQ ID NO: 52560 - RNA, 15 nt, Homo sapiens
ucuaucccaaccucu

SEQ ID NO: 52561 - RNA, 19 nt, Homo sapiens
ucuaugaaauauuauguua

SEQ ID NO: 52562 - RNA, 16 nt, Homo sapiens
ucuaugacacaugcaa

SEQ ID NO: 52563 - RNA, 17 nt, Homo sapiens
ucuaugagggcuaauau

SEQ ID NO: 52564 - RNA, 15 nt, Homo sapiens
ucuauguuaauauuu

SEQ ID NO: 52565 - RNA, 16 nt, Homo sapiens
ucuauuacgugcaaua

SEQ ID NO: 52566 - RNA, 12 nt, Homo sapiens
ucuauugccaug

SEQ ID NO: 52567 - RNA, 15 nt, Homo sapiens
ucucacaagcacuuu

SEQ ID NO: 52568 - RNA, 19 nt, Homo sapiens
ucucaccucccaacguccc

SEQ ID NO: 52569 - RNA, 15 nt, Homo sapiens
ucucaccugugagac

SEQ ID NO: 52570 - RNA, 23 nt, Homo sapiens
ucucaggaaaucaaauaugcaaa

SEQ ID NO: 52571 - RNA, 11 nt, Homo sapiens
ucucagugucc

SEQ ID NO: 52572 - RNA, 14 nt, Homo sapiens
ucucaguugcagcc

SEQ ID NO: 52573 - RNA, 21 nt, Homo sapiens
ucucaguugcagcccugcugc

SEQ ID NO: 52574 - RNA, 13 nt, Homo sapiens
ucucauccacuuu

SEQ ID NO: 52575 - RNA, 14 nt, Homo sapiens
ucucaucugugauu

SEQ ID NO: 52576 - RNA, 20 nt, Homo sapiens
ucuccagucauuauguuaau

SEQ ID NO: 52577 - RNA, 13 nt, Homo sapiens
ucuccaugauccc

SEQ ID NO: 52578 - RNA, 22 nt, Homo sapiens
ucuccaugaucccaccucccau

SEQ ID NO: 52579 - RNA, 18 nt, Homo sapiens
ucuccauggcccugccau

SEQ ID NO: 52580 - RNA, 20 nt, Homo sapiens
ucuccauggcccugccaugc

SEQ ID NO: 52581 - RNA, 17 nt, Homo sapiens
ucucccaaagugcuggg

SEQ ID NO: 52582 - RNA, 18 nt, Homo sapiens
ucucccaaagugcuggga

SEQ ID NO: 52583 - RNA, 20 nt, Homo sapiens
ucucccucuguugccaaggc

SEQ ID NO: 52584 - RNA, 16 nt, Homo sapiens
ucuccgucucccaaag

SEQ ID NO: 52585 - RNA, 12 nt, Homo sapiens
ucuccuuggaua

SEQ ID NO: 52586 - RNA, 18 nt, Homo sapiens
ucucgaacugcuggauuc

SEQ ID NO: 52587 - RNA, 18 nt, Homo sapiens
ucucgugguaggacugua

SEQ ID NO: 52588 - RNA, 13 nt, Homo sapiens
ucucuaacucaga

SEQ ID NO: 52589 - RNA, 15 nt, Homo sapiens
ucucuaacucagaaa

SEQ ID NO: 52590 - RNA, 13 nt, Homo sapiens
ucucuaggaaaua

SEQ ID NO: 52591 - RNA, 16 nt, Homo sapiens
ucucuaggaaauauuu

SEQ ID NO: 52592 - RNA, 19 nt, Homo sapiens
ucucuagucauuuguuaau

SEQ ID NO: 52593 - RNA, 12 nt, Homo sapiens
ucucuaucauua

SEQ ID NO: 52594 - RNA, 22 nt, Homo sapiens
ucucuccucuccccaugauguu

SEQ ID NO: 52595 - RNA, 18 nt, Homo sapiens
ucucugaagugaaacugc

SEQ ID NO: 52596 - RNA, 15 nt, Homo sapiens
ucucugccuugguau

SEQ ID NO: 52597 - RNA, 14 nt, Homo sapiens
ucucuucuuuaaag

SEQ ID NO: 52598 - RNA, 16 nt, Homo sapiens
ucucuuguagcucucu

SEQ ID NO: 52599 - RNA, 15 nt, Homo sapiens
ucucuuuauucagcc

SEQ ID NO: 52600 - RNA, 19 nt, Homo sapiens
ucugagaaagacuauucaa

SEQ ID NO: 52601 - RNA, 13 nt, Homo sapiens
ucugauaccucaa

SEQ ID NO: 52602 - RNA, 18 nt, Homo sapiens
ucugauuuuccuggacag

SEQ ID NO: 52603 - RNA, 21 nt, Homo sapiens
ucugauuuuccuggacaguuu

SEQ ID NO: 52604 - RNA, 24 nt, Homo sapiens
ucugcagcaauaaagcagcguuuc

SEQ ID NO: 52605 - RNA, 23 nt, Homo sapiens
ucugcccauccugccccugagcc

SEQ ID NO: 52606 - RNA, 23 nt, Homo sapiens
ucugcccugcuuuugcuagguca

SEQ ID NO: 52607 - RNA, 14 nt, Homo sapiens
ucugccugcccuga

SEQ ID NO: 52608 - RNA, 22 nt, Homo sapiens
ucugccugcccugaaaguccca

SEQ ID NO: 52609 - RNA, 13 nt, Homo sapiens
ucugcuaugcuau

SEQ ID NO: 52610 - RNA, 18 nt, Homo sapiens
ucugcuauuugcuguuau

SEQ ID NO: 52611 - RNA, 16 nt, Homo sapiens
ucugcuuuaauuucau

SEQ ID NO: 52612 - RNA, 12 nt, Homo sapiens
ucuggaaaccac

SEQ ID NO: 52613 - RNA, 19 nt, Homo sapiens
ucuggaagccucuauugcc

SEQ ID NO: 52614 - RNA, 16 nt, Homo sapiens
ucuggaggucucugaa

SEQ ID NO: 52615 - RNA, 17 nt, Homo sapiens
ucuggcugcugguggcg

SEQ ID NO: 52616 - RNA, 22 nt, Homo sapiens
ucuggcugcugguggcgcuggc

SEQ ID NO: 52617 - RNA, 12 nt, Homo sapiens
ucugggucgccg

SEQ ID NO: 52618 - RNA, 14 nt, Homo sapiens
ucugggucgccggc

SEQ ID NO: 52619 - RNA, 15 nt, Homo sapiens
ucugggucgccggca

SEQ ID NO: 52620 - RNA, 16 nt, Homo sapiens
ucugggucgccggcau

SEQ ID NO: 52621 - RNA, 17 nt, Homo sapiens
ucugggucgccggcauc

SEQ ID NO: 52622 - RNA, 17 nt, Homo sapiens
ucugggucucagugucc

SEQ ID NO: 52623 - RNA, 14 nt, Homo sapiens
ucuggguucaagcg

SEQ ID NO: 52624 - RNA, 19 nt, Homo sapiens
ucugguccuaagucccugc

SEQ ID NO: 52625 - RNA, 22 nt, Homo sapiens
ucuguaaaauggagacaccacc

SEQ ID NO: 52626 - RNA, 12 nt, Homo sapiens
ucuguaaucuuc

SEQ ID NO: 52627 - RNA, 17 nt, Homo sapiens
ucugucuggacuuucca

SEQ ID NO: 52628 - RNA, 21 nt, Homo sapiens
ucugucuggacuuuccagaga

SEQ ID NO: 52629 - RNA, 17 nt, Homo sapiens
ucuguuuuauaauuuug

SEQ ID NO: 52630 - RNA, 21 nt, Homo sapiens
ucuuaaacacuaaaaaggcau

SEQ ID NO: 52631 - RNA, 13 nt, Homo sapiens
ucuuaacuugaag

SEQ ID NO: 52632 - RNA, 16 nt, Homo sapiens
ucuuaaguagggacuu

SEQ ID NO: 52633 - RNA, 17 nt, Homo sapiens
ucuuaauucuuagcuca

SEQ ID NO: 52634 - RNA, 15 nt, Homo sapiens
ucuuaguaugugcau

SEQ ID NO: 52635 - RNA, 22 nt, Homo sapiens
ucuuaguaugugcauuuaauua

SEQ ID NO: 52636 - RNA, 13 nt, Homo sapiens
ucuucacaacaga

SEQ ID NO: 52637 - RNA, 18 nt, Homo sapiens
ucuucacaacagauuauu

SEQ ID NO: 52638 - RNA, 13 nt, Homo sapiens
ucuucacuugguu

SEQ ID NO: 52639 - RNA, 14 nt, Homo sapiens
ucuucauaccuaca

SEQ ID NO: 52640 - RNA, 19 nt, Homo sapiens
ucuucccuuuuacauacug

SEQ ID NO: 52641 - RNA, 23 nt, Homo sapiens
ucuucccuuuuacauacugcugu

SEQ ID NO: 52642 - RNA, 22 nt, Homo sapiens
ucuucuuucaugaaggggcggc

SEQ ID NO: 52643 - RNA, 13 nt, Homo sapiens
ucuugaaagcugu

SEQ ID NO: 52644 - RNA, 22 nt, Homo sapiens
ucuugaaauauaggaacuuaaa

SEQ ID NO: 52645 - RNA, 21 nt, Homo sapiens
ucuugaauuguaggugacuau

SEQ ID NO: 52646 - RNA, 21 nt, Homo sapiens
ucuugauugugggauacuauu

SEQ ID NO: 52647 - RNA, 21 nt, Homo sapiens
ucuugcaauucaauacagauc

SEQ ID NO: 52648 - RNA, 13 nt, Homo sapiens
ucuuggggaauau

SEQ ID NO: 52649 - RNA, 20 nt, Homo sapiens
ucuugugaacccaaagugug

SEQ ID NO: 52650 - RNA, 23 nt, Homo sapiens
ucuuucaagggaccucuccauga

SEQ ID NO: 52651 - RNA, 20 nt, Homo sapiens
ucuuucaugaaggggcggcg

SEQ ID NO: 52652 - RNA, 18 nt, Homo sapiens
ucuuuccaaaguacacug

SEQ ID NO: 52653 - RNA, 21 nt, Homo sapiens
ucuuuuuagagaaauuugcca

SEQ ID NO: 52654 - RNA, 19 nt, Homo sapiens
ucuuuuuccagguuccuga

SEQ ID NO: 52655 - RNA, 20 nt, Homo sapiens
ucuuuuuuuuaauaaaccau

SEQ ID NO: 52656 - RNA, 22 nt, Homo sapiens
ugaaaaaaaauuuuauaguguc

SEQ ID NO: 52657 - RNA, 19 nt, Homo sapiens
ugaaaaaguucugcagaua

SEQ ID NO: 52658 - RNA, 21 nt, Homo sapiens
ugaaaacauagcaucucagga

SEQ ID NO: 52659 - RNA, 19 nt, Homo sapiens
ugaaaacuuuaugcuaagu

SEQ ID NO: 52660 - RNA, 16 nt, Homo sapiens
ugaaaagacuccaaag

SEQ ID NO: 52661 - RNA, 17 nt, Homo sapiens
ugaaaauauuuguauca

SEQ ID NO: 52662 - RNA, 21 nt, Homo sapiens
ugaaaaucuacacuccaguga

SEQ ID NO: 52663 - RNA, 23 nt, Homo sapiens
ugaaaaucuacacuccagugaga

SEQ ID NO: 52664 - RNA, 16 nt, Homo sapiens
ugaaaaugaauaucua

SEQ ID NO: 52665 - RNA, 12 nt, Homo sapiens
ugaaaaugucau

SEQ ID NO: 52666 - RNA, 23 nt, Homo sapiens
ugaaacugagaugugaacacauc

SEQ ID NO: 52667 - RNA, 16 nt, Homo sapiens
ugaaagucccagauca

SEQ ID NO: 52668 - RNA, 21 nt, Homo sapiens
ugaaagucccagaucaagccu

SEQ ID NO: 52669 - RNA, 23 nt, Homo sapiens
ugaaauaagccagacaucaacag

SEQ ID NO: 52670 - RNA, 20 nt, Homo sapiens
ugaacaacucgaaucacuca

SEQ ID NO: 52671 - RNA, 15 nt, Homo sapiens
ugaacacaaagccug

SEQ ID NO: 52672 - RNA, 14 nt, Homo sapiens
ugaacacaucagcu

SEQ ID NO: 52673 - RNA, 15 nt, Homo sapiens
ugaacacaucagcuu

SEQ ID NO: 52674 - RNA, 17 nt, Homo sapiens
ugaacacaucagcuugc

SEQ ID NO: 52675 - RNA, 19 nt, Homo sapiens
ugaacacuuauaagugaag

SEQ ID NO: 52676 - RNA, 16 nt, Homo sapiens
ugaacaggauauucuc

SEQ ID NO: 52677 - RNA, 21 nt, Homo sapiens
ugaacaguuguguuugaagca

SEQ ID NO: 52678 - RNA, 11 nt, Homo sapiens
ugaacauucca

SEQ ID NO: 52679 - RNA, 19 nt, Homo sapiens
ugaaccguuugugauugcc

SEQ ID NO: 52680 - RNA, 18 nt, Homo sapiens
ugaacuagaguuuagcug

SEQ ID NO: 52681 - RNA, 21 nt, Homo sapiens
ugaacuagaguuuagcuggaa

SEQ ID NO: 52682 - RNA, 13 nt, Homo sapiens
ugaacugcagcga

SEQ ID NO: 52683 - RNA, 22 nt, Homo sapiens
ugaacugcagcgaguacuuccc

SEQ ID NO: 52684 - RNA, 21 nt, Homo sapiens
ugaacuuuuuguuuuguuucu

SEQ ID NO: 52685 - RNA, 14 nt, Homo sapiens
ugaagaaacauuua

SEQ ID NO: 52686 - RNA, 13 nt, Homo sapiens
ugaagauacugaa

SEQ ID NO: 52687 - RNA, 15 nt, Homo sapiens
ugaagauacugaaau

SEQ ID NO: 52688 - RNA, 16 nt, Homo sapiens
ugaagauacugaaaua

SEQ ID NO: 52689 - RNA, 21 nt, Homo sapiens
ugaagauacugaaauaaacgu

SEQ ID NO: 52690 - RNA, 22 nt, Homo sapiens
ugaagauagaagguuugcagau

SEQ ID NO: 52691 - RNA, 15 nt, Homo sapiens
ugaagcaaaauuuuu

SEQ ID NO: 52692 - RNA, 14 nt, Homo sapiens
ugaagcuuuaagaa

SEQ ID NO: 52693 - RNA, 13 nt, Homo sapiens
ugaaggggcggcg

SEQ ID NO: 52694 - RNA, 14 nt, Homo sapiens
ugaaggggcggcgg

SEQ ID NO: 52695 - RNA, 15 nt, Homo sapiens
ugaaggggcggcggc

SEQ ID NO: 52696 - RNA, 17 nt, Homo sapiens
ugaaguaauaugcacac

SEQ ID NO: 52697 - RNA, 21 nt, Homo sapiens
ugaaguccaagcauuuagaug

SEQ ID NO: 52698 - RNA, 18 nt, Homo sapiens
ugaagucucugaagugaa

SEQ ID NO: 52699 - RNA, 16 nt, Homo sapiens
ugaaguuuaauugacu

SEQ ID NO: 52700 - RNA, 15 nt, Homo sapiens
ugaauaaaguguaag

SEQ ID NO: 52701 - RNA, 22 nt, Homo sapiens
ugaauaaaguguaaguucacaa

SEQ ID NO: 52702 - RNA, 15 nt, Homo sapiens
ugaauaucaguuauu

SEQ ID NO: 52703 - RNA, 14 nt, Homo sapiens
ugaaugugucaggu

SEQ ID NO: 52704 - RNA, 23 nt, Homo sapiens
ugaauuaaguuuuuuuuuaaaaa

SEQ ID NO: 52705 - RNA, 15 nt, Homo sapiens
ugaauuacauuugua

SEQ ID NO: 52706 - RNA, 14 nt, Homo sapiens
ugaauucccugccu

SEQ ID NO: 52707 - RNA, 12 nt, Homo sapiens
ugacaacuguga

SEQ ID NO: 52708 - RNA, 14 nt, Homo sapiens
ugacaagcucacag

SEQ ID NO: 52709 - RNA, 12 nt, Homo sapiens
ugacacaucucu

SEQ ID NO: 52710 - RNA, 15 nt, Homo sapiens
ugacacuagcuaaua

SEQ ID NO: 52711 - RNA, 19 nt, Homo sapiens
ugacacuagcuaauaucaa

SEQ ID NO: 52712 - RNA, 18 nt, Homo sapiens
ugacagcccaaggguggg

SEQ ID NO: 52713 - RNA, 16 nt, Homo sapiens
ugacauaucacauguc

SEQ ID NO: 52714 - RNA, 16 nt, Homo sapiens
ugacaucucugcaauc

SEQ ID NO: 52715 - RNA, 20 nt, Homo sapiens
ugaccaauaaccaugcccaa

SEQ ID NO: 52716 - RNA, 13 nt, Homo sapiens
ugaccacugcaga

SEQ ID NO: 52717 - RNA, 15 nt, Homo sapiens
ugaccacugcagaag

SEQ ID NO: 52718 - RNA, 13 nt, Homo sapiens
ugacccacaagaa

SEQ ID NO: 52719 - RNA, 15 nt, Homo sapiens
ugacccugaugaaaa

SEQ ID NO: 52720 - RNA, 22 nt, Homo sapiens
ugaccuccuccuucauggcagg

SEQ ID NO: 52721 - RNA, 23 nt, Homo sapiens
ugaccuccuccuucauggcaggc

SEQ ID NO: 52722 - RNA, 14 nt, Homo sapiens
ugaccugacagccc

SEQ ID NO: 52723 - RNA, 18 nt, Homo sapiens
ugaccugacagcccaagg

SEQ ID NO: 52724 - RNA, 19 nt, Homo sapiens
ugaccugacagcccaaggg

SEQ ID NO: 52725 - RNA, 20 nt, Homo sapiens
ugacgugacuggccugcugg

SEQ ID NO: 52726 - RNA, 19 nt, Homo sapiens
ugacuaauuaggcaaggcu

SEQ ID NO: 52727 - RNA, 18 nt, Homo sapiens
ugacuauuauagaaugga

SEQ ID NO: 52728 - RNA, 22 nt, Homo sapiens
ugacuauuauauuuccaagaaa

SEQ ID NO: 52729 - RNA, 22 nt, Homo sapiens
ugacugcuaguuuauauagaaa

SEQ ID NO: 52730 - RNA, 14 nt, Homo sapiens
ugacuggccugcug

SEQ ID NO: 52731 - RNA, 17 nt, Homo sapiens
ugacuggccugcuggau

SEQ ID NO: 52732 - RNA, 15 nt, Homo sapiens
ugacugucucacuua

SEQ ID NO: 52733 - RNA, 18 nt, Homo sapiens
ugacuuaguguacaugaa

SEQ ID NO: 52734 - RNA, 16 nt, Homo sapiens
ugacuuguacucugaa

SEQ ID NO: 52735 - RNA, 18 nt, Homo sapiens
ugagaaagacuauucaaa

SEQ ID NO: 52736 - RNA, 15 nt, Homo sapiens
ugagaagaaugacua

SEQ ID NO: 52737 - RNA, 18 nt, Homo sapiens
ugagacagcucugcauac

SEQ ID NO: 52738 - RNA, 22 nt, Homo sapiens
ugagacagcucugcauacucau

SEQ ID NO: 52739 - RNA, 12 nt, Homo sapiens
ugagaccaaggc

SEQ ID NO: 52740 - RNA, 20 nt, Homo sapiens
ugagaccaaggcccccgggc

SEQ ID NO: 52741 - RNA, 14 nt, Homo sapiens
ugagaccagccaac

SEQ ID NO: 52742 - RNA, 15 nt, Homo sapiens
ugagaccagccaacc

SEQ ID NO: 52743 - RNA, 20 nt, Homo sapiens
ugagagacacacugaagaag

SEQ ID NO: 52744 - RNA, 17 nt, Homo sapiens
ugagagacagcaggucu

SEQ ID NO: 52745 - RNA, 19 nt, Homo sapiens
ugagagacagcaggucuca

SEQ ID NO: 52746 - RNA, 20 nt, Homo sapiens
ugagagcccuucaugcauuu

SEQ ID NO: 52747 - RNA, 15 nt, Homo sapiens
ugagaucaaugugac

SEQ ID NO: 52748 - RNA, 15 nt, Homo sapiens
ugagaucauugugaa

SEQ ID NO: 52749 - RNA, 14 nt, Homo sapiens
ugagcaccugcagg

SEQ ID NO: 52750 - RNA, 15 nt, Homo sapiens
ugagcagauguaaua

SEQ ID NO: 52751 - RNA, 17 nt, Homo sapiens
ugagcagucaggaaaga

SEQ ID NO: 52752 - RNA, 10 nt, Homo sapiens
ugagcccaug

SEQ ID NO: 52753 - RNA, 11 nt, Homo sapiens
ugagcccaugg

SEQ ID NO: 52754 - RNA, 16 nt, Homo sapiens
ugagccuuuguugcua

SEQ ID NO: 52755 - RNA, 13 nt, Homo sapiens
ugagcgacaguga

SEQ ID NO: 52756 - RNA, 14 nt, Homo sapiens
ugagcgacagugag

SEQ ID NO: 52757 - RNA, 19 nt, Homo sapiens
ugagcggaccuucccagcu

SEQ ID NO: 52758 - RNA, 21 nt, Homo sapiens
ugagcuaggggggucagccag

SEQ ID NO: 52759 - RNA, 20 nt, Homo sapiens
ugaggacuugggcgggacac

SEQ ID NO: 52760 - RNA, 18 nt, Homo sapiens
ugaggcauuugcagcugu

SEQ ID NO: 52761 - RNA, 20 nt, Homo sapiens
ugagguaaccucauuaucag

SEQ ID NO: 52762 - RNA, 13 nt, Homo sapiens
ugagguaccagcc

SEQ ID NO: 52763 - RNA, 16 nt, Homo sapiens
ugagguaccagccuug

SEQ ID NO: 52764 - RNA, 19 nt, Homo sapiens
ugagguacugagagugaac

SEQ ID NO: 52765 - RNA, 17 nt, Homo sapiens
ugaguacguugugcauu

SEQ ID NO: 52766 - RNA, 18 nt, Homo sapiens
ugaguacguugugcauuu

SEQ ID NO: 52767 - RNA, 16 nt, Homo sapiens
ugagugccuguaauca

SEQ ID NO: 52768 - RNA, 15 nt, Homo sapiens
ugauaccucaacccc

SEQ ID NO: 52769 - RNA, 19 nt, Homo sapiens
ugauacuuuuuucauuauu

SEQ ID NO: 52770 - RNA, 15 nt, Homo sapiens
ugauagaggcuggcg

SEQ ID NO: 52771 - RNA, 19 nt, Homo sapiens
ugauauccaaagcugaaua

SEQ ID NO: 52772 - RNA, 18 nt, Homo sapiens
ugaucagcuuauugucua

SEQ ID NO: 52773 - RNA, 18 nt, Homo sapiens
ugaucaguaugaaaaugu

SEQ ID NO: 52774 - RNA, 18 nt, Homo sapiens
ugauccugcaauuccacu

SEQ ID NO: 52775 - RNA, 15 nt, Homo sapiens
ugaucucagaaauug

SEQ ID NO: 52776 - RNA, 17 nt, Homo sapiens
ugaugauuaauucaccu

SEQ ID NO: 52777 - RNA, 12 nt, Homo sapiens
ugaugcugagcc

SEQ ID NO: 52778 - RNA, 21 nt, Homo sapiens
ugauggaaauacacuguuauc

SEQ ID NO: 52779 - RNA, 19 nt, Homo sapiens
ugauggugguauguuuuca

SEQ ID NO: 52780 - RNA, 13 nt, Homo sapiens
ugauuaaguaaug

SEQ ID NO: 52781 - RNA, 12 nt, Homo sapiens
ugauucaaaugu

SEQ ID NO: 52782 - RNA, 23 nt, Homo sapiens
ugauucauauuuaauuugaagau

SEQ ID NO: 52783 - RNA, 24 nt, Homo sapiens
ugauucauauuuaauuugaagaua

SEQ ID NO: 52784 - RNA, 22 nt, Homo sapiens
ugauucccagccagcacagccu

SEQ ID NO: 52785 - RNA, 16 nt, Homo sapiens
ugauucccuccugcua

SEQ ID NO: 52786 - RNA, 12 nt, Homo sapiens
ugauugccauuu

SEQ ID NO: 52787 - RNA, 20 nt, Homo sapiens
ugauugugggauacuauuua

SEQ ID NO: 52788 - RNA, 15 nt, Homo sapiens
ugauuucacagugug

SEQ ID NO: 52789 - RNA, 22 nt, Homo sapiens
ugauuucagcaccuacagugua

SEQ ID NO: 52790 - RNA, 15 nt, Homo sapiens
ugauuuccguuaaaa

SEQ ID NO: 52791 - RNA, 16 nt, Homo sapiens
ugauuuuauaugcuau

SEQ ID NO: 52792 - RNA, 17 nt, Homo sapiens
ugauuuuauaugcuauu

SEQ ID NO: 52793 - RNA, 14 nt, Homo sapiens
ugauuuuuguaauu

SEQ ID NO: 52794 - RNA, 18 nt, Homo sapiens
ugauuuuuguaauuuuuu

SEQ ID NO: 52795 - RNA, 19 nt, Homo sapiens
ugauuuuuguaauuuuuuu

SEQ ID NO: 52796 - RNA, 20 nt, Homo sapiens
ugcaaccccaucauccucag

SEQ ID NO: 52797 - RNA, 15 nt, Homo sapiens
ugcaacuacuaucca

SEQ ID NO: 52798 - RNA, 11 nt, Homo sapiens
ugcaagcuuuu

SEQ ID NO: 52799 - RNA, 13 nt, Homo sapiens
ugcaaggucauuu

SEQ ID NO: 52800 - RNA, 21 nt, Homo sapiens
ugcaaucuucucagaaggcaa

SEQ ID NO: 52801 - RNA, 12 nt, Homo sapiens
ugcaauuccacu

SEQ ID NO: 52802 - RNA, 14 nt, Homo sapiens
ugcacaucaaaaua

SEQ ID NO: 52803 - RNA, 17 nt, Homo sapiens
ugcacaucuguuuugua

SEQ ID NO: 52804 - RNA, 18 nt, Homo sapiens
ugcacaucuguuuuguaa

SEQ ID NO: 52805 - RNA, 16 nt, Homo sapiens
ugcaccaacuuugaag

SEQ ID NO: 52806 - RNA, 20 nt, Homo sapiens
ugcacuccagccugagcgac

SEQ ID NO: 52807 - RNA, 14 nt, Homo sapiens
ugcagaagacagua

SEQ ID NO: 52808 - RNA, 19 nt, Homo sapiens
ugcagaggccaccuggauu

SEQ ID NO: 52809 - RNA, 15 nt, Homo sapiens
ugcagauaaacagua

SEQ ID NO: 52810 - RNA, 22 nt, Homo sapiens
ugcagauaaacaguagugauag

SEQ ID NO: 52811 - RNA, 16 nt, Homo sapiens
ugcagccccugggacc

SEQ ID NO: 52812 - RNA, 11 nt, Homo sapiens
ugcagcccugc

SEQ ID NO: 52813 - RNA, 19 nt, Homo sapiens
ugcagcgaguacuucccgc

SEQ ID NO: 52814 - RNA, 21 nt, Homo sapiens
ugcagcgaguacuucccgcug

SEQ ID NO: 52815 - RNA, 16 nt, Homo sapiens
ugcaguucugaagaag

SEQ ID NO: 52816 - RNA, 23 nt, Homo sapiens
ugcauaccacuuuuguucuuggu

SEQ ID NO: 52817 - RNA, 22 nt, Homo sapiens
ugcauaggugaucucauuuaau

SEQ ID NO: 52818 - RNA, 17 nt, Homo sapiens
ugcauauuuuauuauag

SEQ ID NO: 52819 - RNA, 17 nt, Homo sapiens
ugcaugaaguaauaugc

SEQ ID NO: 52820 - RNA, 18 nt, Homo sapiens
ugcaugaaguaauaugca

SEQ ID NO: 52821 - RNA, 22 nt, Homo sapiens
ugcaugguuuagaaagcuugcc

SEQ ID NO: 52822 - RNA, 23 nt, Homo sapiens
ugcauucugagguaaccucauua

SEQ ID NO: 52823 - RNA, 18 nt, Homo sapiens
ugcauugagaacugcaua

SEQ ID NO: 52824 - RNA, 15 nt, Homo sapiens
ugccaaggcuggagu

SEQ ID NO: 52825 - RNA, 20 nt, Homo sapiens
ugccaaggcuggagugcagu

SEQ ID NO: 52826 - RNA, 18 nt, Homo sapiens
ugccaccuccugccucag

SEQ ID NO: 52827 - RNA, 16 nt, Homo sapiens
ugccagccacugugau

SEQ ID NO: 52828 - RNA, 18 nt, Homo sapiens
ugccaucauuuacuuuua

SEQ ID NO: 52829 - RNA, 12 nt, Homo sapiens
ugccaugcuggc

SEQ ID NO: 52830 - RNA, 16 nt, Homo sapiens
ugccaugcuggccagg

SEQ ID NO: 52831 - RNA, 17 nt, Homo sapiens
ugccaugcuggccaggc

SEQ ID NO: 52832 - RNA, 18 nt, Homo sapiens
ugccaugugcuaguaauu

SEQ ID NO: 52833 - RNA, 13 nt, Homo sapiens
ugcccaagaauga

SEQ ID NO: 52834 - RNA, 15 nt, Homo sapiens
ugcccacggcuggag

SEQ ID NO: 52835 - RNA, 16 nt, Homo sapiens
ugcccauccugccccu

SEQ ID NO: 52836 - RNA, 12 nt, Homo sapiens
ugccccggggag

SEQ ID NO: 52837 - RNA, 18 nt, Homo sapiens
ugccccggggaggggcgc

SEQ ID NO: 52838 - RNA, 20 nt, Homo sapiens
ugccccggggaggggcgcuc

SEQ ID NO: 52839 - RNA, 22 nt, Homo sapiens
ugccccggggaggggcgcucgc

SEQ ID NO: 52840 - RNA, 23 nt, Homo sapiens
ugccccggggaggggcgcucgcu

SEQ ID NO: 52841 - RNA, 14 nt, Homo sapiens
ugccccugagccca

SEQ ID NO: 52842 - RNA, 23 nt, Homo sapiens
ugcccugcuuuugcuaggucaca

SEQ ID NO: 52843 - RNA, 14 nt, Homo sapiens
ugcccuuacaggaa

SEQ ID NO: 52844 - RNA, 17 nt, Homo sapiens
ugcccuuccccuuccca

SEQ ID NO: 52845 - RNA, 15 nt, Homo sapiens
ugccguccccagagc

SEQ ID NO: 52846 - RNA, 13 nt, Homo sapiens
ugccgugggccug

SEQ ID NO: 52847 - RNA, 14 nt, Homo sapiens
ugccgugggccuga

SEQ ID NO: 52848 - RNA, 18 nt, Homo sapiens
ugccuaagugcagccccg

SEQ ID NO: 52849 - RNA, 19 nt, Homo sapiens
ugccuaagugcagccccgu

SEQ ID NO: 52850 - RNA, 16 nt, Homo sapiens
ugccucagaaaacaag

SEQ ID NO: 52851 - RNA, 22 nt, Homo sapiens
ugccucucucauccacuuucca

SEQ ID NO: 52852 - RNA, 12 nt, Homo sapiens
ugccugcccuga

SEQ ID NO: 52853 - RNA, 14 nt, Homo sapiens
ugccugcccugaaa

SEQ ID NO: 52854 - RNA, 15 nt, Homo sapiens
ugccuguaaucacag

SEQ ID NO: 52855 - RNA, 15 nt, Homo sapiens
ugcgccuaauguguu

SEQ ID NO: 52856 - RNA, 11 nt, Homo sapiens
ugcgcgccgcg

SEQ ID NO: 52857 - RNA, 12 nt, Homo sapiens
ugcgcgccgcgc

SEQ ID NO: 52858 - RNA, 13 nt, Homo sapiens
ugcgcgccgcgcu

SEQ ID NO: 52859 - RNA, 14 nt, Homo sapiens
ugcgcgccgcgcuc

SEQ ID NO: 52860 - RNA, 17 nt, Homo sapiens
ugcgcgccgcgcuccuc

SEQ ID NO: 52861 - RNA, 20 nt, Homo sapiens
ugcgcgccgcgcuccucgga

SEQ ID NO: 52862 - RNA, 21 nt, Homo sapiens
ugcgcgccgcgcuccucggac

SEQ ID NO: 52863 - RNA, 19 nt, Homo sapiens
ugcgcucggccugcucgcc

SEQ ID NO: 52864 - RNA, 20 nt, Homo sapiens
ugcgcucggccugcucgccc

SEQ ID NO: 52865 - RNA, 12 nt, Homo sapiens
ugcggccugguc

SEQ ID NO: 52866 - RNA, 17 nt, Homo sapiens
ugcuacaaaaacacagc

SEQ ID NO: 52867 - RNA, 20 nt, Homo sapiens
ugcuacaaauacucuuagga

SEQ ID NO: 52868 - RNA, 12 nt, Homo sapiens
ugcuacacacug

SEQ ID NO: 52869 - RNA, 15 nt, Homo sapiens
ugcuaguaauuggaa

SEQ ID NO: 52870 - RNA, 14 nt, Homo sapiens
ugcuaucaauccaa

SEQ ID NO: 52871 - RNA, 12 nt, Homo sapiens
ugcuaucgccau

SEQ ID NO: 52872 - RNA, 19 nt, Homo sapiens
ugcuauugggguugggggg

SEQ ID NO: 52873 - RNA, 20 nt, Homo sapiens
ugcuauugggguuggggggg

SEQ ID NO: 52874 - RNA, 14 nt, Homo sapiens
ugcuauuugcuguu

SEQ ID NO: 52875 - RNA, 16 nt, Homo sapiens
ugcuauuugcuguuau

SEQ ID NO: 52876 - RNA, 22 nt, Homo sapiens
ugcucauggaauuggagcucgu

SEQ ID NO: 52877 - RNA, 15 nt, Homo sapiens
ugcucgcccacuucc

SEQ ID NO: 52878 - RNA, 17 nt, Homo sapiens
ugcucgcccacuuccuc

SEQ ID NO: 52879 - RNA, 22 nt, Homo sapiens
ugcucgcccacuuccucccggc

SEQ ID NO: 52880 - RNA, 22 nt, Homo sapiens
ugcugaaccguuugugauugcc

SEQ ID NO: 52881 - RNA, 14 nt, Homo sapiens
ugcugcccuucccc

SEQ ID NO: 52882 - RNA, 11 nt, Homo sapiens
ugcugccgugg

SEQ ID NO: 52883 - RNA, 14 nt, Homo sapiens
ugcugccgugggcc

SEQ ID NO: 52884 - RNA, 14 nt, Homo sapiens
ugcugccugccugg

SEQ ID NO: 52885 - RNA, 15 nt, Homo sapiens
ugcugccugccugga

SEQ ID NO: 52886 - RNA, 13 nt, Homo sapiens
ugcugcugccugc

SEQ ID NO: 52887 - RNA, 14 nt, Homo sapiens
ugcugcugccugcc

SEQ ID NO: 52888 - RNA, 23 nt, Homo sapiens
ugcuggauguggagggggcgcgu

SEQ ID NO: 52889 - RNA, 17 nt, Homo sapiens
ugcuggauucaagugau

SEQ ID NO: 52890 - RNA, 22 nt, Homo sapiens
ugcuggauucaagugauccgcc

SEQ ID NO: 52891 - RNA, 23 nt, Homo sapiens
ugcuggauucaagugauccgccc

SEQ ID NO: 52892 - RNA, 15 nt, Homo sapiens
ugcuggccaggcugg

SEQ ID NO: 52893 - RNA, 19 nt, Homo sapiens
ugcuggcuuaaaauguaau

SEQ ID NO: 52894 - RNA, 23 nt, Homo sapiens
ugcuggcuugccucuugcaauuc

SEQ ID NO: 52895 - RNA, 21 nt, Homo sapiens
ugcugggaauuacaggcguga

SEQ ID NO: 52896 - RNA, 12 nt, Homo sapiens
ugcugguggcgc

SEQ ID NO: 52897 - RNA, 17 nt, Homo sapiens
ugcugguggcgcuggcu

SEQ ID NO: 52898 - RNA, 21 nt, Homo sapiens
ugcugguggcgcuggcugcgc

SEQ ID NO: 52899 - RNA, 22 nt, Homo sapiens
ugcugguggcgcuggcugcgcu

SEQ ID NO: 52900 - RNA, 14 nt, Homo sapiens
ugcuguaugucucg

SEQ ID NO: 52901 - RNA, 21 nt, Homo sapiens
ugcuguuauuuuaucugcuau

SEQ ID NO: 52902 - RNA, 19 nt, Homo sapiens
ugcuguuuccuagcgcagc

SEQ ID NO: 52903 - RNA, 22 nt, Homo sapiens
ugcuguuuccuagcgcagccau

SEQ ID NO: 52904 - RNA, 13 nt, Homo sapiens
ugcuuguacauaa

SEQ ID NO: 52905 - RNA, 16 nt, Homo sapiens
ugcuuguacauaaugc

SEQ ID NO: 52906 - RNA, 19 nt, Homo sapiens
ugcuuguuagcaaaaugga

SEQ ID NO: 52907 - RNA, 22 nt, Homo sapiens
ugcuuuaauaucaucaguauug

SEQ ID NO: 52908 - RNA, 15 nt, Homo sapiens
ugcuuucuaucuaau

SEQ ID NO: 52909 - RNA, 16 nt, Homo sapiens
uggaaaaaaaggaaga

SEQ ID NO: 52910 - RNA, 15 nt, Homo sapiens
uggaaaaugugcaau

SEQ ID NO: 52911 - RNA, 16 nt, Homo sapiens
uggaaauacacuguua

SEQ ID NO: 52912 - RNA, 16 nt, Homo sapiens
uggaacucaaggaaau

SEQ ID NO: 52913 - RNA, 19 nt, Homo sapiens
uggaagccucuauugccau

SEQ ID NO: 52914 - RNA, 17 nt, Homo sapiens
uggaaguaaauguuguu

SEQ ID NO: 52915 - RNA, 19 nt, Homo sapiens
uggaaguaaauguuguuuu

SEQ ID NO: 52916 - RNA, 14 nt, Homo sapiens
uggaauuggagcuc

SEQ ID NO: 52917 - RNA, 17 nt, Homo sapiens
uggaauuggagcucgug

SEQ ID NO: 52918 - RNA, 18 nt, Homo sapiens
uggaauuggagcucgugg

SEQ ID NO: 52919 - RNA, 22 nt, Homo sapiens
uggacaaaauggaauacucuua

SEQ ID NO: 52920 - RNA, 21 nt, Homo sapiens
uggacaguuuucugcuuuaau

SEQ ID NO: 52921 - RNA, 19 nt, Homo sapiens
uggacaugggccccagaua

SEQ ID NO: 52922 - RNA, 23 nt, Homo sapiens
uggaccauaaccccggaagccaa

SEQ ID NO: 52923 - RNA, 16 nt, Homo sapiens
uggacuuaaaaucuaa

SEQ ID NO: 52924 - RNA, 23 nt, Homo sapiens
uggacuuuccagagaccaguauu

SEQ ID NO: 52925 - RNA, 18 nt, Homo sapiens
uggagaaaggacccucaa

SEQ ID NO: 52926 - RNA, 14 nt, Homo sapiens
uggagacaccacca

SEQ ID NO: 52927 - RNA, 15 nt, Homo sapiens
uggagacaccaccac

SEQ ID NO: 52928 - RNA, 16 nt, Homo sapiens
uggagacaccaccacc

SEQ ID NO: 52929 - RNA, 13 nt, Homo sapiens
uggagcuagaauu

SEQ ID NO: 52930 - RNA, 19 nt, Homo sapiens
uggagcugccucucucauc

SEQ ID NO: 52931 - RNA, 19 nt, Homo sapiens
uggagcuugaaauaguguc

SEQ ID NO: 52932 - RNA, 16 nt, Homo sapiens
uggagugcaguggcgc

SEQ ID NO: 52933 - RNA, 17 nt, Homo sapiens
uggagugcaguggcgca

SEQ ID NO: 52934 - RNA, 19 nt, Homo sapiens
uggauaugacacaucucug

SEQ ID NO: 52935 - RNA, 15 nt, Homo sapiens
uggauggcugccuca

SEQ ID NO: 52936 - RNA, 20 nt, Homo sapiens
uggauuaaacuuaaucuaaa

SEQ ID NO: 52937 - RNA, 16 nt, Homo sapiens
uggauuccucacuuug

SEQ ID NO: 52938 - RNA, 18 nt, Homo sapiens
uggauuccucacuuugaa

SEQ ID NO: 52939 - RNA, 16 nt, Homo sapiens
uggauuuaacagaaau

SEQ ID NO: 52940 - RNA, 13 nt, Homo sapiens
uggcaauagucaa

SEQ ID NO: 52941 - RNA, 13 nt, Homo sapiens
uggcacugcauac

SEQ ID NO: 52942 - RNA, 17 nt, Homo sapiens
uggcacuuauaaccaaa

SEQ ID NO: 52943 - RNA, 15 nt, Homo sapiens
uggcaggcaucgcca

SEQ ID NO: 52944 - RNA, 13 nt, Homo sapiens
uggcaguuuucca

SEQ ID NO: 52945 - RNA, 22 nt, Homo sapiens
uggcauguaugacgugacuggc

SEQ ID NO: 52946 - RNA, 15 nt, Homo sapiens
uggcauuuucacuuu

SEQ ID NO: 52947 - RNA, 13 nt, Homo sapiens
uggccaaugagau

SEQ ID NO: 52948 - RNA, 21 nt, Homo sapiens
uggccaaugagaucauuguga

SEQ ID NO: 52949 - RNA, 14 nt, Homo sapiens
uggccagaagucaa

SEQ ID NO: 52950 - RNA, 19 nt, Homo sapiens
uggccagaagucaaggcuu

SEQ ID NO: 52951 - RNA, 22 nt, Homo sapiens
uggccaggcuggucucgaacug

SEQ ID NO: 52952 - RNA, 19 nt, Homo sapiens
uggccagugagaucaaugu

SEQ ID NO: 52953 - RNA, 20 nt, Homo sapiens
uggccagugagaucaaugug

SEQ ID NO: 52954 - RNA, 20 nt, Homo sapiens
uggcccaggaguuuggccag

SEQ ID NO: 52955 - RNA, 15 nt, Homo sapiens
uggccccugccaccu

SEQ ID NO: 52956 - RNA, 11 nt, Homo sapiens
uggccuuucau

SEQ ID NO: 52957 - RNA, 12 nt, Homo sapiens
uggccuuucaua

SEQ ID NO: 52958 - RNA, 21 nt, Homo sapiens
uggcgacaguuuuccuucuca

SEQ ID NO: 52959 - RNA, 15 nt, Homo sapiens
uggcgcgcgccacca

SEQ ID NO: 52960 - RNA, 19 nt, Homo sapiens
uggcgcgcgccaccacgcc

SEQ ID NO: 52961 - RNA, 12 nt, Homo sapiens
uggcgcuggcug

SEQ ID NO: 52962 - RNA, 13 nt, Homo sapiens
uggcgcuggcugc

SEQ ID NO: 52963 - RNA, 14 nt, Homo sapiens
uggcgcuggcugcg

SEQ ID NO: 52964 - RNA, 18 nt, Homo sapiens
uggcgcuggcugcgcucg

SEQ ID NO: 52965 - RNA, 19 nt, Homo sapiens
uggcgcuggcugcgcucgg

SEQ ID NO: 52966 - RNA, 23 nt, Homo sapiens
uggcuaguaucaaaagaaagaaa

SEQ ID NO: 52967 - RNA, 17 nt, Homo sapiens
uggcugcgcucggccug

SEQ ID NO: 52968 - RNA, 18 nt, Homo sapiens
uggcugcgcucggccugc

SEQ ID NO: 52969 - RNA, 23 nt, Homo sapiens
uggcugcgcucggccugcucgcc

SEQ ID NO: 52970 - RNA, 18 nt, Homo sapiens
uggcugcugguggcgcug

SEQ ID NO: 52971 - RNA, 22 nt, Homo sapiens
uggcugcugguggcgcuggcug

SEQ ID NO: 52972 - RNA, 13 nt, Homo sapiens
uggcugggagugg

SEQ ID NO: 52973 - RNA, 16 nt, Homo sapiens
uggcugggaguggcau

SEQ ID NO: 52974 - RNA, 17 nt, Homo sapiens
uggcugggaguggcaug

SEQ ID NO: 52975 - RNA, 19 nt, Homo sapiens
uggcuugccucuugcaauu

SEQ ID NO: 52976 - RNA, 14 nt, Homo sapiens
uggcuuuugugcau

SEQ ID NO: 52977 - RNA, 15 nt, Homo sapiens
uggcuuuugugcauu

SEQ ID NO: 52978 - RNA, 20 nt, Homo sapiens
ugggaauuacaggcgugagc

SEQ ID NO: 52979 - RNA, 17 nt, Homo sapiens
ugggaauuuucuuccaa

SEQ ID NO: 52980 - RNA, 15 nt, Homo sapiens
ugggacagucaccuc

SEQ ID NO: 52981 - RNA, 23 nt, Homo sapiens
ugggacaguuccugagaccagcc

SEQ ID NO: 52982 - RNA, 24 nt, Homo sapiens
ugggacaguuccugagaccagcca

SEQ ID NO: 52983 - RNA, 19 nt, Homo sapiens
ugggagaaucacuugaacc

SEQ ID NO: 52984 - RNA, 17 nt, Homo sapiens
ugggaguggcauguaug

SEQ ID NO: 52985 - RNA, 23 nt, Homo sapiens
ugggauacuauuuaauuauuuca

SEQ ID NO: 52986 - RNA, 21 nt, Homo sapiens
ugggauagcugacccagcccc

SEQ ID NO: 52987 - RNA, 22 nt, Homo sapiens
ugggcaagggaccugcuucuau

SEQ ID NO: 52988 - RNA, 18 nt, Homo sapiens
ugggcagacucuggucaa

SEQ ID NO: 52989 - RNA, 17 nt, Homo sapiens
ugggccauagucauucu

SEQ ID NO: 52990 - RNA, 19 nt, Homo sapiens
ugggccccagauaccauga

SEQ ID NO: 52991 - RNA, 18 nt, Homo sapiens
ugggccugagaccaaggc

SEQ ID NO: 52992 - RNA, 19 nt, Homo sapiens
ugggccugagaccaaggcc

SEQ ID NO: 52993 - RNA, 17 nt, Homo sapiens
ugggccuggauggcugc

SEQ ID NO: 52994 - RNA, 16 nt, Homo sapiens
uggggcagugcuuggc

SEQ ID NO: 52995 - RNA, 17 nt, Homo sapiens
uggggcagugcuuggcc

SEQ ID NO: 52996 - RNA, 23 nt, Homo sapiens
uggggcagugcuuggcccaggag

SEQ ID NO: 52997 - RNA, 16 nt, Homo sapiens
uggggcugaugcaguu

SEQ ID NO: 52998 - RNA, 17 nt, Homo sapiens
uggggcugaugcaguug

SEQ ID NO: 52999 - RNA, 23 nt, Homo sapiens
uggggguaauaagagcaguagca

SEQ ID NO: 53000 - RNA, 17 nt, Homo sapiens
ugggguugggggggagg

SEQ ID NO: 53001 - RNA, 13 nt, Homo sapiens
ugggucgccggca

SEQ ID NO: 53002 - RNA, 14 nt, Homo sapiens
ugggucgccggcau

SEQ ID NO: 53003 - RNA, 16 nt, Homo sapiens
ugggucgccggcaucu

SEQ ID NO: 53004 - RNA, 18 nt, Homo sapiens
ugggucgccggcaucuuc

SEQ ID NO: 53005 - RNA, 18 nt, Homo sapiens
ugggucucaguguccuca

SEQ ID NO: 53006 - RNA, 11 nt, Homo sapiens
uggguggggca

SEQ ID NO: 53007 - RNA, 16 nt, Homo sapiens
uggguggggcagugcu

SEQ ID NO: 53008 - RNA, 16 nt, Homo sapiens
uggguucaagcgauuc

SEQ ID NO: 53009 - RNA, 17 nt, Homo sapiens
uggguuucacaagugaa

SEQ ID NO: 53010 - RNA, 16 nt, Homo sapiens
uggucaacauggugaa

SEQ ID NO: 53011 - RNA, 23 nt, Homo sapiens
uggucucagugucaaugcagccc

SEQ ID NO: 53012 - RNA, 20 nt, Homo sapiens
uggucucgaacugcuggauu

SEQ ID NO: 53013 - RNA, 14 nt, Homo sapiens
uggugccucaguuu

SEQ ID NO: 53014 - RNA, 18 nt, Homo sapiens
uggugcuuccaaauauug

SEQ ID NO: 53015 - RNA, 16 nt, Homo sapiens
uggugguuucagaaau

SEQ ID NO: 53016 - RNA, 12 nt, Homo sapiens
uggugugaacua

SEQ ID NO: 53017 - RNA, 20 nt, Homo sapiens
ugguucuucuuggucucagu

SEQ ID NO: 53018 - RNA, 13 nt, Homo sapiens
ugguuuguaaauu

SEQ ID NO: 53019 - RNA, 18 nt, Homo sapiens
ugguuuguaaauuaacuu

SEQ ID NO: 53020 - RNA, 18 nt, Homo sapiens
ugguuuuucaguuuucag

SEQ ID NO: 53021 - RNA, 16 nt, Homo sapiens
uguaaaauggagacac

SEQ ID NO: 53022 - RNA, 21 nt, Homo sapiens
uguaaacuaguuacuaaacau

SEQ ID NO: 53023 - RNA, 13 nt, Homo sapiens
uguaaaugugcuu

SEQ ID NO: 53024 - RNA, 15 nt, Homo sapiens
uguaacuguaaagau

SEQ ID NO: 53025 - RNA, 17 nt, Homo sapiens
uguaaguuuaugcauac

SEQ ID NO: 53026 - RNA, 22 nt, Homo sapiens
uguaauagaaauaaaccuauga

SEQ ID NO: 53027 - RNA, 19 nt, Homo sapiens
uguaaucacagcuacuugg

SEQ ID NO: 53028 - RNA, 19 nt, Homo sapiens
uguaaucccagcacuuugg

SEQ ID NO: 53029 - RNA, 18 nt, Homo sapiens
uguaaugaaaaugaauau

SEQ ID NO: 53030 - RNA, 21 nt, Homo sapiens
uguaaugaaaaugaauaucua

SEQ ID NO: 53031 - RNA, 14 nt, Homo sapiens
uguaauugcuuguu

SEQ ID NO: 53032 - RNA, 20 nt, Homo sapiens
uguaauuugugauacaaugc

SEQ ID NO: 53033 - RNA, 16 nt, Homo sapiens
uguacaccaauauuca

SEQ ID NO: 53034 - RNA, 16 nt, Homo sapiens
uguacagucuuguauu

SEQ ID NO: 53035 - RNA, 17 nt, Homo sapiens
uguacauuuccaaauuc

SEQ ID NO: 53036 - RNA, 19 nt, Homo sapiens
uguacauuuccaaauucac

SEQ ID NO: 53037 - RNA, 20 nt, Homo sapiens
uguacgcgagcgcgcgcgcc

SEQ ID NO: 53038 - RNA, 21 nt, Homo sapiens
uguacgcgagcgcgcgcgccc

SEQ ID NO: 53039 - RNA, 23 nt, Homo sapiens
uguacgcgagcgcgcgcgcccuc

SEQ ID NO: 53040 - RNA, 18 nt, Homo sapiens
uguacucugaaaguuuug

SEQ ID NO: 53041 - RNA, 13 nt, Homo sapiens
uguacuuuuucca

SEQ ID NO: 53042 - RNA, 17 nt, Homo sapiens
uguagauaaacucagaa

SEQ ID NO: 53043 - RNA, 17 nt, Homo sapiens
uguagauaaagcacugu

SEQ ID NO: 53044 - RNA, 17 nt, Homo sapiens
uguagccacuucacuuu

SEQ ID NO: 53045 - RNA, 20 nt, Homo sapiens
uguagcguacaucaaugaua

SEQ ID NO: 53046 - RNA, 17 nt, Homo sapiens
uguauaaaauaauuuuu

SEQ ID NO: 53047 - RNA, 14 nt, Homo sapiens
uguauagugcaugu

SEQ ID NO: 53048 - RNA, 12 nt, Homo sapiens
uguaucaugaca

SEQ ID NO: 53049 - RNA, 14 nt, Homo sapiens
uguaugugcacauc

SEQ ID NO: 53050 - RNA, 15 nt, Homo sapiens
uguauuccuuuuucu

SEQ ID NO: 53051 - RNA, 23 nt, Homo sapiens
uguauuuuauuacaucuuucaca

SEQ ID NO: 53052 - RNA, 21 nt, Homo sapiens
ugucaagaugaugaugaucuu

SEQ ID NO: 53053 - RNA, 20 nt, Homo sapiens
ugucaauaaaauccauacau

SEQ ID NO: 53054 - RNA, 12 nt, Homo sapiens
ugucaaugcagc

SEQ ID NO: 53055 - RNA, 15 nt, Homo sapiens
ugucaaugcagcccc

SEQ ID NO: 53056 - RNA, 17 nt, Homo sapiens
ugucagccacugugaua

SEQ ID NO: 53057 - RNA, 13 nt, Homo sapiens
ugucucaguccau

SEQ ID NO: 53058 - RNA, 14 nt, Homo sapiens
ugucucaguccaug

SEQ ID NO: 53059 - RNA, 23 nt, Homo sapiens
ugucucgugguaggacuguagaa

SEQ ID NO: 53060 - RNA, 19 nt, Homo sapiens
ugucuggcacuugggacaa

SEQ ID NO: 53061 - RNA, 22 nt, Homo sapiens
ugucuuacagagaaaagacaua

SEQ ID NO: 53062 - RNA, 23 nt, Homo sapiens
ugucuuacagagaaaagacauaa

SEQ ID NO: 53063 - RNA, 22 nt, Homo sapiens
ugucuugggaauuuucuuccaa

SEQ ID NO: 53064 - RNA, 19 nt, Homo sapiens
ugugaacuaaacuuucaca

SEQ ID NO: 53065 - RNA, 13 nt, Homo sapiens
ugugaagcaaaau

SEQ ID NO: 53066 - RNA, 20 nt, Homo sapiens
ugugaaggcaggggaaugua

SEQ ID NO: 53067 - RNA, 11 nt, Homo sapiens
ugugacucauu

SEQ ID NO: 53068 - RNA, 13 nt, Homo sapiens
ugugacuuuccua

SEQ ID NO: 53069 - RNA, 12 nt, Homo sapiens
ugugauacaaug

SEQ ID NO: 53070 - RNA, 17 nt, Homo sapiens
ugugauuacccucuggg

SEQ ID NO: 53071 - RNA, 20 nt, Homo sapiens
ugugauugacgggacuguug

SEQ ID NO: 53072 - RNA, 12 nt, Homo sapiens
ugugauugccau

SEQ ID NO: 53073 - RNA, 23 nt, Homo sapiens
ugugcauuaucuagauacuguau

SEQ ID NO: 53074 - RNA, 15 nt, Homo sapiens
ugugccuucauuuuu

SEQ ID NO: 53075 - RNA, 15 nt, Homo sapiens
uguggcaaaucucua

SEQ ID NO: 53076 - RNA, 17 nt, Homo sapiens
uguggcauuuucacuuu

SEQ ID NO: 53077 - RNA, 23 nt, Homo sapiens
uguggcuguaucuuguuuuucca

SEQ ID NO: 53078 - RNA, 19 nt, Homo sapiens
ugugggcaauguucccccu

SEQ ID NO: 53079 - RNA, 14 nt, Homo sapiens
uguggucacaggaa

SEQ ID NO: 53080 - RNA, 21 nt, Homo sapiens
ugugguccgaagucuuccaua

SEQ ID NO: 53081 - RNA, 19 nt, Homo sapiens
uguguggcauuuucacuuu

SEQ ID NO: 53082 - RNA, 15 nt, Homo sapiens
uguguucaguacaau

SEQ ID NO: 53083 - RNA, 23 nt, Homo sapiens
uguguuugauauccaaagcugaa

SEQ ID NO: 53084 - RNA, 14 nt, Homo sapiens
uguguuuuucacau

SEQ ID NO: 53085 - RNA, 20 nt, Homo sapiens
uguuaaaagaugaaaauauu

SEQ ID NO: 53086 - RNA, 21 nt, Homo sapiens
uguuaaaagaugaaaauauuu

SEQ ID NO: 53087 - RNA, 20 nt, Homo sapiens
uguuaaguaucagcuacaau

SEQ ID NO: 53088 - RNA, 14 nt, Homo sapiens
uguuaaucuuucaa

SEQ ID NO: 53089 - RNA, 16 nt, Homo sapiens
uguuacauuuuuaagu

SEQ ID NO: 53090 - RNA, 16 nt, Homo sapiens
uguuacuaaguuuuua

SEQ ID NO: 53091 - RNA, 18 nt, Homo sapiens
uguuacugccuaucagca

SEQ ID NO: 53092 - RNA, 14 nt, Homo sapiens
uguuagagcagaga

SEQ ID NO: 53093 - RNA, 22 nt, Homo sapiens
uguuagcaaaauggauaugaca

SEQ ID NO: 53094 - RNA, 18 nt, Homo sapiens
uguuaucuucacuuuuau

SEQ ID NO: 53095 - RNA, 16 nt, Homo sapiens
uguuauuuauugaaau

SEQ ID NO: 53096 - RNA, 18 nt, Homo sapiens
uguucacuuauugacuau

SEQ ID NO: 53097 - RNA, 15 nt, Homo sapiens
uguuccucgccacgc

SEQ ID NO: 53098 - RNA, 13 nt, Homo sapiens
uguucuauaacaa

SEQ ID NO: 53099 - RNA, 16 nt, Homo sapiens
uguugacaugggacau

SEQ ID NO: 53100 - RNA, 13 nt, Homo sapiens
uguugauagcaag

SEQ ID NO: 53101 - RNA, 17 nt, Homo sapiens
uguugcuaucaauccaa

SEQ ID NO: 53102 - RNA, 17 nt, Homo sapiens
uguuggaaaaugugcaa

SEQ ID NO: 53103 - RNA, 18 nt, Homo sapiens
uguuggaaaaugugcaau

SEQ ID NO: 53104 - RNA, 19 nt, Homo sapiens
uguuggaaaaugugcaaua

SEQ ID NO: 53105 - RNA, 17 nt, Homo sapiens
uguugguacuagauacu

SEQ ID NO: 53106 - RNA, 20 nt, Homo sapiens
uguuguuuuaggaauacaua

SEQ ID NO: 53107 - RNA, 21 nt, Homo sapiens
uguuguuuuaggaauacauaa

SEQ ID NO: 53108 - RNA, 23 nt, Homo sapiens
uguuuacaaaccucaagccagcc

SEQ ID NO: 53109 - RNA, 16 nt, Homo sapiens
uguuuagaaacacaac

SEQ ID NO: 53110 - RNA, 13 nt, Homo sapiens
uguuucauaagaa

SEQ ID NO: 53111 - RNA, 18 nt, Homo sapiens
uguuuccauagggugaca

SEQ ID NO: 53112 - RNA, 19 nt, Homo sapiens
uguuuccauagggugacac

SEQ ID NO: 53113 - RNA, 12 nt, Homo sapiens
uguuuccaucaa

SEQ ID NO: 53114 - RNA, 18 nt, Homo sapiens
uguuuccuagcgcagcca

SEQ ID NO: 53115 - RNA, 19 nt, Homo sapiens
uguuugaagcacagugauc

SEQ ID NO: 53116 - RNA, 12 nt, Homo sapiens
uguuugugauug

SEQ ID NO: 53117 - RNA, 14 nt, Homo sapiens
uguuuuaaggaugc

SEQ ID NO: 53118 - RNA, 16 nt, Homo sapiens
uguuuuaggaauacau

SEQ ID NO: 53119 - RNA, 14 nt, Homo sapiens
uguuuucauuaucu

SEQ ID NO: 53120 - RNA, 19 nt, Homo sapiens
uuaaaaaaaaaccugagcc

SEQ ID NO: 53121 - RNA, 20 nt, Homo sapiens
uuaaaaaaaaaccugagccc

SEQ ID NO: 53122 - RNA, 19 nt, Homo sapiens
uuaaaaaaaaauacugaug

SEQ ID NO: 53123 - RNA, 16 nt, Homo sapiens
uuaaaagaaugauuau

SEQ ID NO: 53124 - RNA, 23 nt, Homo sapiens
uuaaaauauuuuuaugugcaaua

SEQ ID NO: 53125 - RNA, 21 nt, Homo sapiens
uuaaaaucacaaacucaucca

SEQ ID NO: 53126 - RNA, 20 nt, Homo sapiens
uuaaaaucuaauucaaacua

SEQ ID NO: 53127 - RNA, 13 nt, Homo sapiens
uuaaaauguaauu

SEQ ID NO: 53128 - RNA, 14 nt, Homo sapiens
uuaaacuuacuuag

SEQ ID NO: 53129 - RNA, 15 nt, Homo sapiens
uuaaagaauuuucaa

SEQ ID NO: 53130 - RNA, 16 nt, Homo sapiens
uuaaaguucuagugac

SEQ ID NO: 53131 - RNA, 23 nt, Homo sapiens
uuaaauaaaauuuuuauguaauu

SEQ ID NO: 53132 - RNA, 20 nt, Homo sapiens
uuaaauaaugugaaacugga

SEQ ID NO: 53133 - RNA, 22 nt, Homo sapiens
uuaaauagcuuuuuucucugau

SEQ ID NO: 53134 - RNA, 17 nt, Homo sapiens
uuaaauggagaaaggac

SEQ ID NO: 53135 - RNA, 16 nt, Homo sapiens
uuaacaaaauuugaau

SEQ ID NO: 53136 - RNA, 15 nt, Homo sapiens
uuaacacagugucug

SEQ ID NO: 53137 - RNA, 14 nt, Homo sapiens
uuaaccucuaaauu

SEQ ID NO: 53138 - RNA, 22 nt, Homo sapiens
uuaagagagucuauuuacggaa

SEQ ID NO: 53139 - RNA, 12 nt, Homo sapiens
uuaagccuuaaa

SEQ ID NO: 53140 - RNA, 19 nt, Homo sapiens
uuaaggaugcuuguacaua

SEQ ID NO: 53141 - RNA, 13 nt, Homo sapiens
uuaaguaucugac

SEQ ID NO: 53142 - RNA, 14 nt, Homo sapiens
uuaaguaucugaca

SEQ ID NO: 53143 - RNA, 19 nt, Homo sapiens
uuaaguuuuuuuuuaaaaa

SEQ ID NO: 53144 - RNA, 19 nt, Homo sapiens
uuaauaucaucaguauuga

SEQ ID NO: 53145 - RNA, 15 nt, Homo sapiens
uuaauauuucugagg

SEQ ID NO: 53146 - RNA, 11 nt, Homo sapiens
uuaaucaccaa

SEQ ID NO: 53147 - RNA, 11 nt, Homo sapiens
uuaauguggaa

SEQ ID NO: 53148 - RNA, 12 nt, Homo sapiens
uuaauguggaaa

SEQ ID NO: 53149 - RNA, 17 nt, Homo sapiens
uuacaaaccucaagcca

SEQ ID NO: 53150 - RNA, 14 nt, Homo sapiens
uuacagagacagaa

SEQ ID NO: 53151 - RNA, 16 nt, Homo sapiens
uuacaggaacagaaga

SEQ ID NO: 53152 - RNA, 18 nt, Homo sapiens
uuacauuuguauaaaaua

SEQ ID NO: 53153 - RNA, 20 nt, Homo sapiens
uuacccccugggagccccaa

SEQ ID NO: 53154 - RNA, 16 nt, Homo sapiens
uuaccuuuguucccaa

SEQ ID NO: 53155 - RNA, 12 nt, Homo sapiens
uuacgugcaaua

SEQ ID NO: 53156 - RNA, 14 nt, Homo sapiens
uuacuaaacaugua

SEQ ID NO: 53157 - RNA, 21 nt, Homo sapiens
uuacuauuuauugcugaauga

SEQ ID NO: 53158 - RNA, 22 nt, Homo sapiens
uuacuauuuauugcugaaugac

SEQ ID NO: 53159 - RNA, 20 nt, Homo sapiens
uuacugagcuucucugugaa

SEQ ID NO: 53160 - RNA, 18 nt, Homo sapiens
uuacuguaagaaaauauc

SEQ ID NO: 53161 - RNA, 13 nt, Homo sapiens
uuacuucuucuca

SEQ ID NO: 53162 - RNA, 13 nt, Homo sapiens
uuagaaacacaac

SEQ ID NO: 53163 - RNA, 15 nt, Homo sapiens
uuagacccucaugcu

SEQ ID NO: 53164 - RNA, 23 nt, Homo sapiens
uuagagaauuuccuuacucuuga

SEQ ID NO: 53165 - RNA, 23 nt, Homo sapiens
uuagagcagagagguuucgauau

SEQ ID NO: 53166 - RNA, 15 nt, Homo sapiens
uuagaugaaugucag

SEQ ID NO: 53167 - RNA, 21 nt, Homo sapiens
uuagaugcaguucugaagaag

SEQ ID NO: 53168 - RNA, 16 nt, Homo sapiens
uuagcccaucuuucaa

SEQ ID NO: 53169 - RNA, 12 nt, Homo sapiens
uuagccgggcgu

SEQ ID NO: 53170 - RNA, 21 nt, Homo sapiens
uuagccgggcgugguggugag

SEQ ID NO: 53171 - RNA, 22 nt, Homo sapiens
uuagccgggcgugguggugagu

SEQ ID NO: 53172 - RNA, 18 nt, Homo sapiens
uuaggaguaccauaauuc

SEQ ID NO: 53173 - RNA, 14 nt, Homo sapiens
uuagggguagcauu

SEQ ID NO: 53174 - RNA, 16 nt, Homo sapiens
uuaguaugugcauuua

SEQ ID NO: 53175 - RNA, 22 nt, Homo sapiens
uuaguucaauccugauucauau

SEQ ID NO: 53176 - RNA, 19 nt, Homo sapiens
uuaguucaaucuggauuca

SEQ ID NO: 53177 - RNA, 15 nt, Homo sapiens
uuaguucuucaaaga

SEQ ID NO: 53178 - RNA, 20 nt, Homo sapiens
uuauaagaaauaggaaauau

SEQ ID NO: 53179 - RNA, 21 nt, Homo sapiens
uuauaagugaagugauacuau

SEQ ID NO: 53180 - RNA, 12 nt, Homo sapiens
uuauaaucuuuu

SEQ ID NO: 53181 - RNA, 16 nt, Homo sapiens
uuauagccagguaccu

SEQ ID NO: 53182 - RNA, 16 nt, Homo sapiens
uuauaguaaugugacu

SEQ ID NO: 53183 - RNA, 23 nt, Homo sapiens
uuauauuuccaagaaauauuccu

SEQ ID NO: 53184 - RNA, 15 nt, Homo sapiens
uuauauuugaaauau

SEQ ID NO: 53185 - RNA, 19 nt, Homo sapiens
uuaucaugcaaaugcugua

SEQ ID NO: 53186 - RNA, 17 nt, Homo sapiens
uuauccuuguuaaguau

SEQ ID NO: 53187 - RNA, 16 nt, Homo sapiens
uuaucucaaaacugca

SEQ ID NO: 53188 - RNA, 12 nt, Homo sapiens
uuaucugcuaug

SEQ ID NO: 53189 - RNA, 13 nt, Homo sapiens
uuaucuucacuuu

SEQ ID NO: 53190 - RNA, 16 nt, Homo sapiens
uuaugaaacauuacag

SEQ ID NO: 53191 - RNA, 16 nt, Homo sapiens
uuaugacuucauuaau

SEQ ID NO: 53192 - RNA, 16 nt, Homo sapiens
uuaugcauaaagucag

SEQ ID NO: 53193 - RNA, 15 nt, Homo sapiens
uuauguguaaaauaa

SEQ ID NO: 53194 - RNA, 15 nt, Homo sapiens
uuauuaccucugaua

SEQ ID NO: 53195 - RNA, 21 nt, Homo sapiens
uuauuauuuuagagcaucuca

SEQ ID NO: 53196 - RNA, 16 nt, Homo sapiens
uuauugauguuuucau

SEQ ID NO: 53197 - RNA, 12 nt, Homo sapiens
uuauuguagcau

SEQ ID NO: 53198 - RNA, 19 nt, Homo sapiens
uuauuuagggaacugcuug

SEQ ID NO: 53199 - RNA, 16 nt, Homo sapiens
uuauuuauuuauucau

SEQ ID NO: 53200 - RNA, 12 nt, Homo sapiens
uuauuucacuuu

SEQ ID NO: 53201 - RNA, 15 nt, Homo sapiens
uuauuuuaucugcua

SEQ ID NO: 53202 - RNA, 16 nt, Homo sapiens
uuauuuuuacaguucu

SEQ ID NO: 53203 - RNA, 17 nt, Homo sapiens
uuauuuuuuuacuuccu

SEQ ID NO: 53204 - RNA, 23 nt, Homo sapiens
uucaaaaauuauauuuugaacaa

SEQ ID NO: 53205 - RNA, 19 nt, Homo sapiens
uucaaaaucaaauuccaga

SEQ ID NO: 53206 - RNA, 21 nt, Homo sapiens
uucaaaaucaaauuccagaau

SEQ ID NO: 53207 - RNA, 17 nt, Homo sapiens
uucaaaauuggacuuaa

SEQ ID NO: 53208 - RNA, 19 nt, Homo sapiens
uucaaacagucucaggaaa

SEQ ID NO: 53209 - RNA, 12 nt, Homo sapiens
uucaaacuuuac

SEQ ID NO: 53210 - RNA, 14 nt, Homo sapiens
uucaaacuuuacua

SEQ ID NO: 53211 - RNA, 22 nt, Homo sapiens
uucacaaagaacaggaaaauaa

SEQ ID NO: 53212 - RNA, 16 nt, Homo sapiens
uucacaagacccaaaa

SEQ ID NO: 53213 - RNA, 13 nt, Homo sapiens
uucacagccagac

SEQ ID NO: 53214 - RNA, 16 nt, Homo sapiens
uucacaggggacagga

SEQ ID NO: 53215 - RNA, 13 nt, Homo sapiens
uucacauuggaaa

SEQ ID NO: 53216 - RNA, 14 nt, Homo sapiens
uucacauuggaaac

SEQ ID NO: 53217 - RNA, 15 nt, Homo sapiens
uucacauuggaaaca

SEQ ID NO: 53218 - RNA, 17 nt, Homo sapiens
uucacuccacuuggaca

SEQ ID NO: 53219 - RNA, 14 nt, Homo sapiens
uucacuuauugacu

SEQ ID NO: 53220 - RNA, 20 nt, Homo sapiens
uucacuuuuauaagaaauag

SEQ ID NO: 53221 - RNA, 17 nt, Homo sapiens
uucagauaugauucaaa

SEQ ID NO: 53222 - RNA, 18 nt, Homo sapiens
uucaggaugcccacggcu

SEQ ID NO: 53223 - RNA, 19 nt, Homo sapiens
uucaggaugcccacggcug

SEQ ID NO: 53224 - RNA, 14 nt, Homo sapiens
uucauaacaucgaa

SEQ ID NO: 53225 - RNA, 17 nt, Homo sapiens
uucauaagaauucuguu

SEQ ID NO: 53226 - RNA, 15 nt, Homo sapiens
uucaugaaggggcgg

SEQ ID NO: 53227 - RNA, 18 nt, Homo sapiens
uucaugaaggggcggcgg

SEQ ID NO: 53228 - RNA, 19 nt, Homo sapiens
uucaugaaggggcggcggc

SEQ ID NO: 53229 - RNA, 16 nt, Homo sapiens
uucaugcauuugcacu

SEQ ID NO: 53230 - RNA, 14 nt, Homo sapiens
uucauuccauuugc

SEQ ID NO: 53231 - RNA, 14 nt, Homo sapiens
uuccaaauucacaa

SEQ ID NO: 53232 - RNA, 12 nt, Homo sapiens
uuccaagaaaua

SEQ ID NO: 53233 - RNA, 13 nt, Homo sapiens
uuccaagaaauau

SEQ ID NO: 53234 - RNA, 21 nt, Homo sapiens
uuccaagcaaguauuagaaua

SEQ ID NO: 53235 - RNA, 14 nt, Homo sapiens
uuccaauacauuau

SEQ ID NO: 53236 - RNA, 19 nt, Homo sapiens
uuccaggaaaaucugcacu

SEQ ID NO: 53237 - RNA, 18 nt, Homo sapiens
uuccagggcuacgcgcgc

SEQ ID NO: 53238 - RNA, 19 nt, Homo sapiens
uuccagggcuacgcgcgcu

SEQ ID NO: 53239 - RNA, 18 nt, Homo sapiens
uuccaucaaggguacacu

SEQ ID NO: 53240 - RNA, 15 nt, Homo sapiens
uuccauuccaagccu

SEQ ID NO: 53241 - RNA, 12 nt, Homo sapiens
uucccacacugu

SEQ ID NO: 53242 - RNA, 23 nt, Homo sapiens
uucccagcuagaauucacuccac

SEQ ID NO: 53243 - RNA, 12 nt, Homo sapiens
uuccccaaccac

SEQ ID NO: 53244 - RNA, 18 nt, Homo sapiens
uuccccuucccacacugu

SEQ ID NO: 53245 - RNA, 18 nt, Homo sapiens
uucccugaccucccucua

SEQ ID NO: 53246 - RNA, 11 nt, Homo sapiens
uuccgcauccu

SEQ ID NO: 53247 - RNA, 16 nt, Homo sapiens
uuccguggcacugcau

SEQ ID NO: 53248 - RNA, 17 nt, Homo sapiens
uuccguggcacugcaua

SEQ ID NO: 53249 - RNA, 18 nt, Homo sapiens
uuccuaacaggaauuuuc

SEQ ID NO: 53250 - RNA, 15 nt, Homo sapiens
uuccuagcgcagcca

SEQ ID NO: 53251 - RNA, 15 nt, Homo sapiens
uuccuauguaacugc

SEQ ID NO: 53252 - RNA, 16 nt, Homo sapiens
uuccuauguaacugca

SEQ ID NO: 53253 - RNA, 14 nt, Homo sapiens
uuccucacuuugaa

SEQ ID NO: 53254 - RNA, 15 nt, Homo sapiens
uuccucccggccgcg

SEQ ID NO: 53255 - RNA, 17 nt, Homo sapiens
uuccucccuggaaucuu

SEQ ID NO: 53256 - RNA, 16 nt, Homo sapiens
uuccuccgcugggccu

SEQ ID NO: 53257 - RNA, 20 nt, Homo sapiens
uuccugaacaggauauucuc

SEQ ID NO: 53258 - RNA, 14 nt, Homo sapiens
uuccugacugcuag

SEQ ID NO: 53259 - RNA, 15 nt, Homo sapiens
uuccuggacaguuuu

SEQ ID NO: 53260 - RNA, 16 nt, Homo sapiens
uuccuuaucacugaca

SEQ ID NO: 53261 - RNA, 19 nt, Homo sapiens
uuccuucucaucugugauu

SEQ ID NO: 53262 - RNA, 12 nt, Homo sapiens
uucgcgcgccuc

SEQ ID NO: 53263 - RNA, 23 nt, Homo sapiens
uucgcgcgccuccgcuacuucca

SEQ ID NO: 53264 - RNA, 19 nt, Homo sapiens
uucgugaaguauacuguau

SEQ ID NO: 53265 - RNA, 15 nt, Homo sapiens
uucgugaugacauau

SEQ ID NO: 53266 - RNA, 19 nt, Homo sapiens
uucuaaguaaaaccacagc

SEQ ID NO: 53267 - RNA, 19 nt, Homo sapiens
uucuacauacuauggaauu

SEQ ID NO: 53268 - RNA, 21 nt, Homo sapiens
uucuaggacugaauuaugaaa

SEQ ID NO: 53269 - RNA, 13 nt, Homo sapiens
uucuagugaccga

SEQ ID NO: 53270 - RNA, 14 nt, Homo sapiens
uucuaugaaauauu

SEQ ID NO: 53271 - RNA, 23 nt, Homo sapiens
uucucuaguucaaguucaccaga

SEQ ID NO: 53272 - RNA, 22 nt, Homo sapiens
uucucugccuugguauagcaua

SEQ ID NO: 53273 - RNA, 19 nt, Homo sapiens
uucucuggcgacaguuuuc

SEQ ID NO: 53274 - RNA, 12 nt, Homo sapiens
uucugaagaaga

SEQ ID NO: 53275 - RNA, 17 nt, Homo sapiens
uucugagaaagacuauu

SEQ ID NO: 53276 - RNA, 13 nt, Homo sapiens
uucugcaagcuuu

SEQ ID NO: 53277 - RNA, 17 nt, Homo sapiens
uucugcaagcuuuucaa

SEQ ID NO: 53278 - RNA, 23 nt, Homo sapiens
uucugcagauaaacaguagugau

SEQ ID NO: 53279 - RNA, 20 nt, Homo sapiens
uucugcccugcuuuugcuag

SEQ ID NO: 53280 - RNA, 18 nt, Homo sapiens
uucugucuggacuuucca

SEQ ID NO: 53281 - RNA, 21 nt, Homo sapiens
uucuuagggaaggauacaaaa

SEQ ID NO: 53282 - RNA, 15 nt, Homo sapiens
uucuucuugguucug

SEQ ID NO: 53283 - RNA, 14 nt, Homo sapiens
uugaaauagugucu

SEQ ID NO: 53284 - RNA, 20 nt, Homo sapiens
uugaaauagugucugaugaa

SEQ ID NO: 53285 - RNA, 20 nt, Homo sapiens
uugaaauauaggaacuuaaa

SEQ ID NO: 53286 - RNA, 17 nt, Homo sapiens
uugaaauuaaccauaga

SEQ ID NO: 53287 - RNA, 22 nt, Homo sapiens
uugaacaacucgaaucacucau

SEQ ID NO: 53288 - RNA, 15 nt, Homo sapiens
uugaacccaggagau

SEQ ID NO: 53289 - RNA, 13 nt, Homo sapiens
uugaacuuugacc

SEQ ID NO: 53290 - RNA, 19 nt, Homo sapiens
uugaagagguuuuaaagcu

SEQ ID NO: 53291 - RNA, 13 nt, Homo sapiens
uugaagauucuau

SEQ ID NO: 53292 - RNA, 17 nt, Homo sapiens
uugaagauuuaauuacu

SEQ ID NO: 53293 - RNA, 19 nt, Homo sapiens
uugaagcuuuaagaacuaa

SEQ ID NO: 53294 - RNA, 20 nt, Homo sapiens
uugaaggaguccuugcauca

SEQ ID NO: 53295 - RNA, 12 nt, Homo sapiens
uugaauccagaa

SEQ ID NO: 53296 - RNA, 19 nt, Homo sapiens
uugaaucccuuaaacucag

SEQ ID NO: 53297 - RNA, 22 nt, Homo sapiens
uugaauuguaggugacuauuau

SEQ ID NO: 53298 - RNA, 15 nt, Homo sapiens
uugacaacugugacu

SEQ ID NO: 53299 - RNA, 20 nt, Homo sapiens
uugacacuuaaaaaugguuu

SEQ ID NO: 53300 - RNA, 17 nt, Homo sapiens
uugaccucugcagcaau

SEQ ID NO: 53301 - RNA, 20 nt, Homo sapiens
uugagaaggagcucccagga

SEQ ID NO: 53302 - RNA, 16 nt, Homo sapiens
uugagauugugaaauu

SEQ ID NO: 53303 - RNA, 11 nt, Homo sapiens
uugagcaccug

SEQ ID NO: 53304 - RNA, 16 nt, Homo sapiens
uugagcaccugcaggc

SEQ ID NO: 53305 - RNA, 15 nt, Homo sapiens
uugagcuaggggggu

SEQ ID NO: 53306 - RNA, 20 nt, Homo sapiens
uugauaaucaacugggcuga

SEQ ID NO: 53307 - RNA, 17 nt, Homo sapiens
uugauuuuauaugcuau

SEQ ID NO: 53308 - RNA, 21 nt, Homo sapiens
uugcaaaguaucccuacugua

SEQ ID NO: 53309 - RNA, 15 nt, Homo sapiens
uugcaccaacuuuga

SEQ ID NO: 53310 - RNA, 23 nt, Homo sapiens
uugcaugguuuagaaagcuugcc

SEQ ID NO: 53311 - RNA, 16 nt, Homo sapiens
uugcauuuaauuuauu

SEQ ID NO: 53312 - RNA, 13 nt, Homo sapiens
uugccaugcuggc

SEQ ID NO: 53313 - RNA, 21 nt, Homo sapiens
uugccaugcuggccaggcugg

SEQ ID NO: 53314 - RNA, 20 nt, Homo sapiens
uugccgcuuaagcuuucagc

SEQ ID NO: 53315 - RNA, 21 nt, Homo sapiens
uugcuccuggcuggggccugu

SEQ ID NO: 53316 - RNA, 22 nt, Homo sapiens
uugcuccuggcuggggccuguu

SEQ ID NO: 53317 - RNA, 16 nt, Homo sapiens
uugcuggagcucugcc

SEQ ID NO: 53318 - RNA, 14 nt, Homo sapiens
uugcuugaacccag

SEQ ID NO: 53319 - RNA, 15 nt, Homo sapiens
uuggaaaaugugcaa

SEQ ID NO: 53320 - RNA, 17 nt, Homo sapiens
uuggaaaaugugcaaua

SEQ ID NO: 53321 - RNA, 17 nt, Homo sapiens
uuggacaaaauggaaua

SEQ ID NO: 53322 - RNA, 13 nt, Homo sapiens
uuggacucauuuu

SEQ ID NO: 53323 - RNA, 16 nt, Homo sapiens
uuggacuuccauuugg

SEQ ID NO: 53324 - RNA, 21 nt, Homo sapiens
uuggagaagaacugaaaucau

SEQ ID NO: 53325 - RNA, 19 nt, Homo sapiens
uuggauacuccauggggug

SEQ ID NO: 53326 - RNA, 16 nt, Homo sapiens
uuggaugcacuuuaua

SEQ ID NO: 53327 - RNA, 21 nt, Homo sapiens
uuggauucaauuuuaaggcau

SEQ ID NO: 53328 - RNA, 17 nt, Homo sapiens
uuggccagaagucaagg

SEQ ID NO: 53329 - RNA, 21 nt, Homo sapiens
uuggcccaggaguuuggccag

SEQ ID NO: 53330 - RNA, 23 nt, Homo sapiens
uuggcccaggaguuuggccagaa

SEQ ID NO: 53331 - RNA, 11 nt, Homo sapiens
uugggaaagga

SEQ ID NO: 53332 - RNA, 19 nt, Homo sapiens
uugggaggcugaggcgggu

SEQ ID NO: 53333 - RNA, 22 nt, Homo sapiens
uugggaggcugaggcgggugga

SEQ ID NO: 53334 - RNA, 12 nt, Homo sapiens
uugggcagguca

SEQ ID NO: 53335 - RNA, 15 nt, Homo sapiens
uuggggcugaugcag

SEQ ID NO: 53336 - RNA, 14 nt, Homo sapiens
uuguaaaauggugu

SEQ ID NO: 53337 - RNA, 18 nt, Homo sapiens
uuguaaaauggugugacc

SEQ ID NO: 53338 - RNA, 18 nt, Homo sapiens
uuguaacuguaaagauga

SEQ ID NO: 53339 - RNA, 24 nt, Homo sapiens
uuguaacuguaaagaugaauguca

SEQ ID NO: 53340 - RNA, 17 nt, Homo sapiens
uuguaacuuaugaaccu

SEQ ID NO: 53341 - RNA, 17 nt, Homo sapiens
uuguaaguuuaugcaua

SEQ ID NO: 53342 - RNA, 21 nt, Homo sapiens
uuguacauaaugcgugcauac

SEQ ID NO: 53343 - RNA, 16 nt, Homo sapiens
uuguaccgcaauguga

SEQ ID NO: 53344 - RNA, 17 nt, Homo sapiens
uuguagaagucacauuc

SEQ ID NO: 53345 - RNA, 18 nt, Homo sapiens
uuguagccacuucacuuu

SEQ ID NO: 53346 - RNA, 15 nt, Homo sapiens
uuguagcucucugac

SEQ ID NO: 53347 - RNA, 14 nt, Homo sapiens
uuguauaaaauaau

SEQ ID NO: 53348 - RNA, 14 nt, Homo sapiens
uugugaagaaacau

SEQ ID NO: 53349 - RNA, 20 nt, Homo sapiens
uugugauacaaugcugugcc

SEQ ID NO: 53350 - RNA, 21 nt, Homo sapiens
uugugcauuaucuagauacug

SEQ ID NO: 53351 - RNA, 15 nt, Homo sapiens
uugugggauacuauu

SEQ ID NO: 53352 - RNA, 18 nt, Homo sapiens
uugugugcacauauccuu

SEQ ID NO: 53353 - RNA, 21 nt, Homo sapiens
uuguguguuuauuucacuuga

SEQ ID NO: 53354 - RNA, 21 nt, Homo sapiens
uuguuaguaugaggcauuugu

SEQ ID NO: 53355 - RNA, 20 nt, Homo sapiens
uuguucccaaauuucauacc

SEQ ID NO: 53356 - RNA, 16 nt, Homo sapiens
uuguuggauaaaucag

SEQ ID NO: 53357 - RNA, 17 nt, Homo sapiens
uuguuucagugcacuaa

SEQ ID NO: 53358 - RNA, 18 nt, Homo sapiens
uuguuuucauuaucucaa

SEQ ID NO: 53359 - RNA, 21 nt, Homo sapiens
uuuaaaaaaaaauacugaugu

SEQ ID NO: 53360 - RNA, 13 nt, Homo sapiens
uuuaaaaaaugga

SEQ ID NO: 53361 - RNA, 21 nt, Homo sapiens
uuuaaaaucauuucugcauca

SEQ ID NO: 53362 - RNA, 18 nt, Homo sapiens
uuuaaaauuaaagcuaaa

SEQ ID NO: 53363 - RNA, 12 nt, Homo sapiens
uuuaaacuuuga

SEQ ID NO: 53364 - RNA, 18 nt, Homo sapiens
uuuaaaguaaaggcaaac

SEQ ID NO: 53365 - RNA, 21 nt, Homo sapiens
uuuaagaaaaaggaugcacag

SEQ ID NO: 53366 - RNA, 9 nt, Homo sapiens
uuuaauauc

SEQ ID NO: 53367 - RNA, 15 nt, Homo sapiens
uuuaauggcauguca

SEQ ID NO: 53368 - RNA, 17 nt, Homo sapiens
uuuaaugggcacagggu

SEQ ID NO: 53369 - RNA, 13 nt, Homo sapiens
uuuacuuccucag

SEQ ID NO: 53370 - RNA, 13 nt, Homo sapiens
uuuagcagauuua

SEQ ID NO: 53371 - RNA, 20 nt, Homo sapiens
uuuagcagauuuaagauaug

SEQ ID NO: 53372 - RNA, 21 nt, Homo sapiens
uuuagcauaguaccucugcua

SEQ ID NO: 53373 - RNA, 22 nt, Homo sapiens
uuuagcauaguaccucugcuau

SEQ ID NO: 53374 - RNA, 23 nt, Homo sapiens
uuuagcauaguaccucugcuauu

SEQ ID NO: 53375 - RNA, 12 nt, Homo sapiens
uuuagcuggaaa

SEQ ID NO: 53376 - RNA, 22 nt, Homo sapiens
uuuauaauguagcagcucauaa

SEQ ID NO: 53377 - RNA, 19 nt, Homo sapiens
uuuauauuugaaauauuga

SEQ ID NO: 53378 - RNA, 18 nt, Homo sapiens
uuuaucugcuaugcuauu

SEQ ID NO: 53379 - RNA, 13 nt, Homo sapiens
uuuaugcauacag

SEQ ID NO: 53380 - RNA, 13 nt, Homo sapiens
uuuaugcuuuaaa

SEQ ID NO: 53381 - RNA, 16 nt, Homo sapiens
uuuauuaccucugaua

SEQ ID NO: 53382 - RNA, 17 nt, Homo sapiens
uuuauuauuuucaccug

SEQ ID NO: 53383 - RNA, 18 nt, Homo sapiens
uuuauugaaaugauuuca

SEQ ID NO: 53384 - RNA, 15 nt, Homo sapiens
uuuauugcugaauga

SEQ ID NO: 53385 - RNA, 14 nt, Homo sapiens
uuuauugcuuguug

SEQ ID NO: 53386 - RNA, 23 nt, Homo sapiens
uuucaaacauauauaacaaugcu

SEQ ID NO: 53387 - RNA, 22 nt, Homo sapiens
uuucaagggaccucuccaugau

SEQ ID NO: 53388 - RNA, 18 nt, Homo sapiens
uuucacaaagaacaggaa

SEQ ID NO: 53389 - RNA, 19 nt, Homo sapiens
uuucacaaagaacaggaaa

SEQ ID NO: 53390 - RNA, 18 nt, Homo sapiens
uuucaugaaggggcggcg

SEQ ID NO: 53391 - RNA, 23 nt, Homo sapiens
uuuccacauaaggaaacuggguu

SEQ ID NO: 53392 - RNA, 15 nt, Homo sapiens
uuuccacuacugcua

SEQ ID NO: 53393 - RNA, 16 nt, Homo sapiens
uuuccagguuccugag

SEQ ID NO: 53394 - RNA, 22 nt, Homo sapiens
uuuccuagcgcagccaugugau

SEQ ID NO: 53395 - RNA, 16 nt, Homo sapiens
uuucuaugaaauauua

SEQ ID NO: 53396 - RNA, 18 nt, Homo sapiens
uuucuaugacacaugcaa

SEQ ID NO: 53397 - RNA, 19 nt, Homo sapiens
uuucucuaggaaauauuua

SEQ ID NO: 53398 - RNA, 20 nt, Homo sapiens
uuucucugauacagaaaagu

SEQ ID NO: 53399 - RNA, 11 nt, Homo sapiens
uuucugaaauu

SEQ ID NO: 53400 - RNA, 12 nt, Homo sapiens
uuucugaaauuu

SEQ ID NO: 53401 - RNA, 22 nt, Homo sapiens
uuucugagaaagacuauucaaa

SEQ ID NO: 53402 - RNA, 12 nt, Homo sapiens
uuucugcuuuaa

SEQ ID NO: 53403 - RNA, 19 nt, Homo sapiens
uuucuggcuaugcauuuga

SEQ ID NO: 53404 - RNA, 16 nt, Homo sapiens
uuucuucgugaugaca

SEQ ID NO: 53405 - RNA, 23 nt, Homo sapiens
uuucuuguaaggcauacugccuu

SEQ ID NO: 53406 - RNA, 20 nt, Homo sapiens
uuugaacaacucgaaucacu

SEQ ID NO: 53407 - RNA, 11 nt, Homo sapiens
uuugaacacaa

SEQ ID NO: 53408 - RNA, 11 nt, Homo sapiens
uuugagcucug

SEQ ID NO: 53409 - RNA, 20 nt, Homo sapiens
uuugaugauuaauucaccuu

SEQ ID NO: 53410 - RNA, 22 nt, Homo sapiens
uuugcagcuuucucuaguucaa

SEQ ID NO: 53411 - RNA, 10 nt, Homo sapiens
uuugccaugc

SEQ ID NO: 53412 - RNA, 14 nt, Homo sapiens
uuugccguuauuaa

SEQ ID NO: 53413 - RNA, 21 nt, Homo sapiens
uuugcuaagcauuccaacuau

SEQ ID NO: 53414 - RNA, 18 nt, Homo sapiens
uuugcucauggaauugga

SEQ ID NO: 53415 - RNA, 20 nt, Homo sapiens
uuugcugccucuaaaaggcc

SEQ ID NO: 53416 - RNA, 22 nt, Homo sapiens
uuuggcagugauauucaucaua

SEQ ID NO: 53417 - RNA, 17 nt, Homo sapiens
uuuguagcguacaucaa

SEQ ID NO: 53418 - RNA, 20 nt, Homo sapiens
uuuguauaaaauaauuuuua

SEQ ID NO: 53419 - RNA, 19 nt, Homo sapiens
uuugugaagaaacauuuau

SEQ ID NO: 53420 - RNA, 11 nt, Homo sapiens
uuugugaagca

SEQ ID NO: 53421 - RNA, 12 nt, Homo sapiens
uuugugaagcaa

SEQ ID NO: 53422 - RNA, 22 nt, Homo sapiens
uuuguuaguaugaggcauuugu

SEQ ID NO: 53423 - RNA, 14 nt, Homo sapiens
uuuuaaacuuugau

SEQ ID NO: 53424 - RNA, 23 nt, Homo sapiens
uuuuaaagcuuccauuguugucu

SEQ ID NO: 53425 - RNA, 15 nt, Homo sapiens
uuuuaaaugcaccug

SEQ ID NO: 53426 - RNA, 15 nt, Homo sapiens
uuuuaaggcauauuu

SEQ ID NO: 53427 - RNA, 14 nt, Homo sapiens
uuuuaagugcugca

SEQ ID NO: 53428 - RNA, 16 nt, Homo sapiens
uuuuacauacugcugu

SEQ ID NO: 53429 - RNA, 14 nt, Homo sapiens
uuuuacauggcugg

SEQ ID NO: 53430 - RNA, 13 nt, Homo sapiens
uuuuaguugucaa

SEQ ID NO: 53431 - RNA, 16 nt, Homo sapiens
uuuuauaaacuuuacc

SEQ ID NO: 53432 - RNA, 22 nt, Homo sapiens
uuuuaucgucacugcuuaacuu

SEQ ID NO: 53433 - RNA, 18 nt, Homo sapiens
uuuuaugaaacauuacag

SEQ ID NO: 53434 - RNA, 23 nt, Homo sapiens
uuuuauggaggcuuugcauagau

SEQ ID NO: 53435 - RNA, 19 nt, Homo sapiens
uuuuauggcuuuugugcau

SEQ ID NO: 53436 - RNA, 13 nt, Homo sapiens
uuuuauuuaaccu

SEQ ID NO: 53437 - RNA, 21 nt, Homo sapiens
uuuucaauaaaacuuuuccaa

SEQ ID NO: 53438 - RNA, 18 nt, Homo sapiens
uuuucacaaagaacagga

SEQ ID NO: 53439 - RNA, 15 nt, Homo sapiens
uuuuccuguucuuaa

SEQ ID NO: 53440 - RNA, 14 nt, Homo sapiens
uuuugaaaugucaa

SEQ ID NO: 53441 - RNA, 13 nt, Homo sapiens
uuuugcuguagaa

SEQ ID NO: 53442 - RNA, 17 nt, Homo sapiens
uuuugcuuuucaacaca

SEQ ID NO: 53443 - RNA, 16 nt, Homo sapiens
uuuugguugcuuuaau

SEQ ID NO: 53444 - RNA, 19 nt, Homo sapiens
uuuuuaagugcugcauuua

SEQ ID NO: 53445 - RNA, 17 nt, Homo sapiens
uuuuuccagguuccuga

SEQ ID NO: 53446 - RNA, 23 nt, Homo sapiens
uuuuuccuuccuuaucacugaca

SEQ ID NO: 53447 - RNA, 11 nt, Homo sapiens
uuuuugcagcu

SEQ ID NO: 53448 - RNA, 83 nt, Bordetella pertussis
aaaccuauuagaaaucaagugucuaaugaauuaugauaugagucugcauacauagacuuuggcgcuugauuccucauggcuuu

SEQ ID NO: 53449 - RNA, 63 nt, Bordetella pertussis
acaaggaguccggcgccucguuccuguacgugacgcacgaccaggaagaggcgcuguccaugu

SEQ ID NO: 53450 - RNA, 64 nt, Bordetella pertussis
acgaccagaucaugcgcuuggguuggaagaucuucaucccgcugaccggcguguggcuggucgu

SEQ ID NO: 53451 - RNA, 57 nt, Bordetella pertussis
acuguaaaccuuuuagaagugccuguuuucauugggaaaaucugaucgguaugcagu

SEQ ID NO: 53452 - RNA, 129 nt, Bordetella pertussis
agccuucguaagucuguccggcaccguggcggaccaugugcgagccgcucaggcccgcgguuacgccgacgccugccgcggccugcauggcguucgcgccggcguugauggucuggugcaguuggaggu

SEQ ID NO: 53453 - RNA, 64 nt, Bordetella pertussis
aggugaucgggcggcugggugacguccugcaggugcaggaugaggucggcgcgcucgaucucuu

SEQ ID NO: 53454 - RNA, 56 nt, Bordetella pertussis
aucagcggccuguugcgcgugggcgcgauugcgucggugcagcaggaucugcuggu

SEQ ID NO: 53455 - RNA, 77 nt, Bordetella pertussis
aucgugcuggugggcagcgaauucuggcacggccuggucgacuggcugggcgagcaauugcuggccaacggcaugau

SEQ ID NO: 53456 - RNA, 55 nt, Bordetella pertussis
auggcgucgggcgugcccuugggcgccacgaugccgaagaauacgcugacgucgu

SEQ ID NO: 53457 - RNA, 55 nt, Bordetella pertussis
caagcccgugcgccugcccuucaucgauacgcuggacaaggcgcgcgagguggug

SEQ ID NO: 53458 - RNA, 87 nt, Bordetella pertussis
cagcgcguggccgggguccugaggccaggccggaugguagaugcgcgcgaccucgggacggcccugcaggaacucgcacacgcgcug

SEQ ID NO: 53459 - RNA, 96 nt, Bordetella pertussis
cagcgccugggccuggcgcccaagguggcgcugcugucgcgcucgaacuucggcucgggcagcucggccucgggcgccaagaugcgccacgcgcug

SEQ ID NO: 53460 - RNA, 55 nt, Bordetella pertussis
cagggucagcgcguacgacaugcggcgcuugguggccgugggcacgcugaccuug

SEQ ID NO: 53461 - RNA, 60 nt, Bordetella pertussis
caguacggcgccagccccgaccugggcccggggcgccagggacgggagggugccgaacug

SEQ ID NO: 53462 - RNA, 67 nt, Bordetella pertussis
cauggcguuguugaccagcacuuuguccaugaccaccuggaagaacaagggcgucaacagggcaaug

SEQ ID NO: 53463 - RNA, 89 nt, Bordetella pertussis
ccagcagcuugaggucggcggucaggccgaugcagccgaagaagaucagcagcaggguggguuugauguuggucucgagcgagaucugg

SEQ ID NO: 53464 - RNA, 98 nt, Bordetella pertussis
ccagcagugcaauggggaucaacuuccagaucaugggcaacuccuuaaaacugggaacagacggaauguccaugauaguugaggccgggcacgguugg

SEQ ID NO: 53465 - RNA, 84 nt, Bordetella pertussis
ccagcggcgccugguugcagcacgugccguaucgagguugcggcccggcgcugacggacgugcugucgcggcaggugccgcugg

SEQ ID NO: 53466 - RNA, 80 nt, Bordetella pertussis
ccauuucagcucgcugacgcuggaccgcggcuaucugaucaagugggccgugggcagcgucgugcuggggcugugccugg

SEQ ID NO: 53467 - RNA, 60 nt, Bordetella pertussis
cccgcggcccggccccagauggccgauugcaucagcacgaacagauuguccgggccgggg

SEQ ID NO: 53468 - RNA, 73 nt, Bordetella pertussis
ccgccagguggguauccaucagccccagcgagguguacagcuggaagaaaggcagcaggaacaccgccggcgg

SEQ ID NO: 53469 - RNA, 60 nt, Bordetella pertussis
ccgccgccgcccugcugcaccugacccagagcgcggucagccagcaguugcagcggcugg

SEQ ID NO: 53470 - RNA, 68 nt, Bordetella pertussis
ccggacagcgucuggaugacgcgaugcguggaacgcgcguucgcgcgccugucgugcggauuugccgg

SEQ ID NO: 53471 - RNA, 58 nt, Bordetella pertussis
ccugaaugccagcgcgaccucgcagggcgcccccuucgacgucauccugcgcuucggg

SEQ ID NO: 53472 - RNA, 80 nt, Bordetella pertussis
ccuguaccaauuguggauguucucccugguggucugguacgccuaccgcgacccgggcagcagcgccaucaugcggcagg

SEQ ID NO: 53473 - RNA, 57 nt, Bordetella pertussis
ccuucggccgcauccugcucaaggucaauagggacggcucgcaggugcgccugaagg

SEQ ID NO: 53474 - RNA, 83 nt, Bordetella pertussis
cgauggcggggauggaguucagcagcucgcagucuugcuugaggucggggugguugucgaugugcugaucgaucgcccgcucg

SEQ ID NO: 53475 - RNA, 130 nt, Bordetella pertussis
cgcaccggguggcgcccggucaugagcgccgaacgcgugggcacgcaaucgcuuuccacguugaaguugagaaacugcgugcccugcgcggccagcgcaucgauacgcggcgugggcgccccgcggaugg

SEQ ID NO: 53476 - RNA, 62 nt, Bordetella pertussis
cgccgacagcacgcgccgcaagggcagugcgcaggcgcuguucgcggccgugcaugccggcg

SEQ ID NO: 53477 - RNA, 62 nt, Bordetella pertussis
cgccgugguggcggccgacauaccauucggggaagaguucgagcucggccgccagccgggcg

SEQ ID NO: 53478 - RNA, 82 nt, Bordetella pertussis
cgcgacgcugcgguggccggcauccgcaagcugcugggcaucgcgccgggccagccggugccggccgaccaagucgagugcg

SEQ ID NO: 53479 - RNA, 60 nt, Bordetella pertussis
cgcgccagccugcgcaaccugcugaaccauuaccugaucaccacggccgggcugagcgcg

SEQ ID NO: 53480 - RNA, 59 nt, Bordetella pertussis
cgcgcgcggcgcggaugcgcagcaaaucgccggggauggcauccgacgccgugcucgcg

SEQ ID NO: 53481 - RNA, 70 nt, Bordetella pertussis
cggcaauccagccguucgguucgcaagcuggcggccgcccugcaggugaaccuggacuggcuggagaccg

SEQ ID NO: 53482 - RNA, 99 nt, Bordetella pertussis
cggaucgcucagcguguccgccgugagccacagaaugcccgccgacagauggcccggcaucgcgcgugcgcugcgcgcggaaaugcaugagauacaccg

SEQ ID NO: 53483 - RNA, 67 nt, Bordetella pertussis
cggauuggcgcugcacagggaccaccccgagauaggcggccaggcucugggcggagucgauaugccg

SEQ ID NO: 53484 - RNA, 113 nt, Bordetella pertussis
cggccgcgugcuggacgcccagccgccgcugcuggugcaggagcgccugcuguuucgcgucaucuggaucggcuucgugguccugacccuggcggugggcuccggcucggucg

SEQ ID NO: 53485 - RNA, 111 nt, Bordetella pertussis
cgucguucggcuggcgccugggccugaccgugcugggcgcuuuccugacggccggguuccugaugcugggcgugaccgccaugcaggcccugcgccgcccgcuggacgacg

SEQ ID NO: 53486 - RNA, 64 nt, Bordetella pertussis
cguggaugauggccucggcgcgggccagcaccaccaggcccagcggcgugggcgucaugccgcg

SEQ ID NO: 53487 - RNA, 89 nt, Bordetella pertussis
cuauucgaacggccugaccgguuuccugggcgggcugagcgccaacacgcugggccugcugggcaaccuggugacgcuggacguggugg

SEQ ID NO: 53488 - RNA, 91 nt, Bordetella pertussis
cugccgccgguguccgauaccgugcccggcuacgacgccgauaucuggcugggcgugugggccguggccgguacgccggacacgguggugg

SEQ ID NO: 53489 - RNA, 59 nt, Bordetella pertussis
cuggugaucggcugcucgaccuuccccaccuggaacggcuauccgggccuguucgccag

SEQ ID NO: 53490 - RNA, 73 nt, Bordetella pertussis
gaaagucggcgaagggcgcguuggugauguacagcuugcugccgugcaggcgccagccgcccucgacgcgcuc

SEQ ID NO: 53491 - RNA, 67 nt, Bordetella pertussis
gacguuacgugccuuccgggcgcaacuggccguccagcgcggccagccgcugggggguacccacguc

SEQ ID NO: 53492 - RNA, 72 nt, Bordetella pertussis
gagaauccgcauuuguggacgccggaguuccgcgaagaaauccgcgaacucuuccgcaaagcggucgaacuc

SEQ ID NO: 53493 - RNA, 81 nt, Bordetella pertussis
gaugcgggucucgaugcgauggcggccauccuccaugcaccagcgcaccagggcaaggucgccguggcagcgccccucguc

SEQ ID NO: 53494 - RNA, 84 nt, Bordetella pertussis
gcaccgaacugcagcagggccugcguuucgcuggcaucgaucuugacgaugcccagcgguugcgcggccaggcgcaggcggugc

SEQ ID NO: 53495 - RNA, 62 nt, Bordetella pertussis
gcagcaggcacccggccagcgucgcguccggauagucgcgccgcagguccggcgccugcagc

SEQ ID NO: 53496 - RNA, 65 nt, Bordetella pertussis
gcagcagggccagcaccgagccauagagcagcggcugcugcagaucguucuugccggccuugugc

SEQ ID NO: 53497 - RNA, 102 nt, Bordetella pertussis
gcagccgccagcgccacaucgagaaccugauggaccacuggcagccgcccgucgauggcgcgcgccugguggccacgcugcuggaucgcgaaggcgagcugc

SEQ ID NO: 53498 - RNA, 77 nt, Bordetella pertussis
gcagggugggccggcacaggaagcgccagcaaucggccagguccuggcgaaacgucguggcgcgcgccgcgcccugc

SEQ ID NO: 53499 - RNA, 129 nt, Bordetella pertussis
gcaugccggccuucgucgccgccaugaacgccaaggcgcguucgcugggcaugcugaacacgcgcuucgucgagcccaccggccuguccagcgagaacguguccucgccgcgcgaccuggcccgcaugc

SEQ ID NO: 53500 - RNA, 82 nt, Bordetella pertussis
gccaagaucgccgguucgggcggcuaccuucccgaacgcgucgucaccaacgacgaucuggccgccgagcuggcgacgcggc

SEQ ID NO: 53501 - RNA, 59 nt, Bordetella pertussis
gccagccggcccacgaaggcgagauuaugcucgacgaaaacuaccguggcgccguuggc

SEQ ID NO: 53502 - RNA, 69 nt, Bordetella pertussis
gccgagacggucgagcacaugcugacgcaggccgcggccagcggccuguccaucaugugcuucgucggc

SEQ ID NO: 53503 - RNA, 80 nt, Bordetella pertussis
gccgccccggucggggcguugcaugcugcccacccggccccugugccgcgugggcauuuugcugcgcccgccgggccggc

SEQ ID NO: 53504 - RNA, 61 nt, Bordetella pertussis
gccggaucggccgccuucagcgcgcccaucacgguuucgcucuggguggccgaggucuggc

SEQ ID NO: 53505 - RNA, 55 nt, Bordetella pertussis
gccggcguggucgacgaggccauggcccaggccgccgaucugcugccaugccggu

SEQ ID NO: 53506 - RNA, 80 nt, Bordetella pertussis
gccgggcgcgcagcgccgcggccgcgucgucaugaacagucaugaaaauuccuugagcgcccggcgcuacaccgccuggc

SEQ ID NO: 53507 - RNA, 75 nt, Bordetella pertussis
gccgucgugcaggccaugaacgaccgcuucgagaccgcggccaucgccaucuucguggccauggugcucgacggc

SEQ ID NO: 53508 - RNA, 62 nt, Bordetella pertussis
gccgugugcuugaugaauggagaaauacgcauagcccucgugcuccgugugcggcgcgcggu

SEQ ID NO: 53509 - RNA, 87 nt, Bordetella pertussis
gccuaucccccgcuaucgggcauccugcacaguccggacgugggggucgacuacuacaucuggaccuugcagaucgccggggugggc

SEQ ID NO: 53510 - RNA, 70 nt, Bordetella pertussis
gcgcaggugcaggccgcccucggcgcccggaaucgccgggucgucggccucggcggccgaguagccgcgc

SEQ ID NO: 53511 - RNA, 70 nt, Bordetella pertussis
gcgccgccgggcgccaccgugcuggcgcgcucggcccaggacgcgcaccagauacugcgccuggccccgc

SEQ ID NO: 53512 - RNA, 58 nt, Bordetella pertussis
gcgcgucgugaaugcccaucagcugcuuggaaaaagccgugaaggcaaucgcgccggc

SEQ ID NO: 53513 - RNA, 62 nt, Bordetella pertussis
gcgcgguagaucgccagguguucuucgugcaccgcgugcacagggucgcccuggcgccgcgu

SEQ ID NO: 53514 - RNA, 78 nt, Bordetella pertussis
gcggcacgaccuugaucuugcuggcgucgccgaacaccgccgcggcgacggcacggcacaggucgacguccaggccgc

SEQ ID NO: 53515 - RNA, 80 nt, Bordetella pertussis
gcggugaccgugggcuuguccuugcuguccaggcgcggcgcguggcccuggaccagcucgcgggcgcgauaggucgccgc

SEQ ID NO: 53516 - RNA, 95 nt, Bordetella pertussis
gcgugccggcggcauccagcccggcggccuggcgcagcaucucggcguagcugccgugcgcggcgcgcagggcggcggcgggauugccgguaugc

SEQ ID NO: 53517 - RNA, 89 nt, Bordetella pertussis
gcgugcugcguauaccgugggcagcuggucguagucgguaucggccggagcgaccgccagccagcagcccgcgccaaacgccgccacgc

SEQ ID NO: 53518 - RNA, 61 nt, Bordetella pertussis
gcgugggccgggcccggcacugccaacugcagaugcugguucuccagcuuggcgaccacgc

SEQ ID NO: 53519 - RNA, 61 nt, Bordetella pertussis
gcuagcuccugucgugggucgcuucugguuugauuguaaugacccgcggggggauggcggc

SEQ ID NO: 53520 - RNA, 69 nt, Bordetella pertussis
gcuccuucggccugcgugcgcacgaugaagccgccuuucuccuccggcggcaucagcgccugcaggcgc

SEQ ID NO: 53521 - RNA, 87 nt, Bordetella pertussis
gcugaagccgggaaagaagaaaugcuugaccaggccgucggcgcgcugcgagggcaggccguggcagguuuccacccaggcuucggc

SEQ ID NO: 53522 - RNA, 55 nt, Bordetella pertussis
gcugcugguggucgacggucaggugggcuuccugggcgggcugaauaucagcagc

SEQ ID NO: 53523 - RNA, 60 nt, Bordetella pertussis
gcuggguacguugcuggucggcaucgccuucggcggcagcaucgucagcggcgugacggc

SEQ ID NO: 53524 - RNA, 112 nt, Bordetella pertussis
gcuggugaccucgcgcugggccggcaagcugaccgugaucgaccuggagaccaaaaaggugagccagcaggugcgugucggcaaaucgccgcacgguguguggacgcucggc

SEQ ID NO: 53525 - RNA, 90 nt, Bordetella pertussis
gcugguggagacgaaagcgcuguugcugcugccgaccuggcaggaacguccggucagauggucgagcacauugucguuguuuccccacgc

SEQ ID NO: 53526 - RNA, 70 nt, Bordetella pertussis
gcugguucgaaggcagcgccucgaucaccuccauggucaacgacaaggccugggaagcgcugccgccggc

SEQ ID NO: 53527 - RNA, 90 nt, Bordetella pertussis
gcuucucguacaggcccagguugaucgcccaugugccauuggaccccaugacgaugguauagccaucggcggccugcuuggcgacauagc

SEQ ID NO: 53528 - RNA, 79 nt, Bordetella pertussis
ggaugcgcaggagcagaccuucguugaucguacccugaucgaacucgacggcaccgacagcaaggagcgccugggcgcc

SEQ ID NO: 53529 - RNA, 59 nt, Bordetella pertussis
ggcagcacgccgaagccgucgaucagauacaggccuucgcggccuucggcauugcggcc

SEQ ID NO: 53530 - RNA, 71 nt, Bordetella pertussis
ggcagcaggauguugcggcgaauguugcgccauucaagcagcgcgucgcgcuggaacaccaugccuaugcc

SEQ ID NO: 53531 - RNA, 66 nt, Bordetella pertussis
ggccaugaugggcccggcggucaggccgaacuggccgacuuucaugcccggccaguuaugcaugcc

SEQ ID NO: 53532 - RNA, 85 nt, Bordetella pertussis
ggccgcgugcccuacaagggcagcgugcuggccaucaucuaccagcuggugggcggcauccgcgccucgaugggcuacugcggcu

SEQ ID NO: 53533 - RNA, 91 nt, Bordetella pertussis
ggccggguccugcagcagcgcggcaucgaccgcgccgauuuccccuucggccuucuugagcagguugccgaugcgcuuguuggccgcggcc

SEQ ID NO: 53534 - RNA, 56 nt, Bordetella pertussis
ggccgugggcgccgacgugcgucaccucaagaagggcgaccgcgucgccuauggcc

SEQ ID NO: 53535 - RNA, 72 nt, Bordetella pertussis
ggcgagguugacgcgcuugcccagcagguucagcuccagccccagcaggcgcuugcgcgucagguucucguc

SEQ ID NO: 53536 - RNA, 85 nt, Bordetella pertussis
ggcgcaggaugcgguagugguuggggcugccgucgggcaggcggcgcggcagcaggaacagcgacacgccgcgcaggccugcguc

SEQ ID NO: 53537 - RNA, 58 nt, Bordetella pertussis
ggcgcgcaaugcgcguuacgcaucgccaacuggcgagugggcagggugcaugcgcgcc

SEQ ID NO: 53538 - RNA, 89 nt, Bordetella pertussis
ggcgcgcagcagcaggcgcauggugugcagauggcgcgcgccgccguccugcagcggcuccagcagguccagcgccugcugggcgcgcc

SEQ ID NO: 53539 - RNA, 71 nt, Bordetella pertussis
ggcgcggcguccuacaacaugaagcugccgccauucacgucgaugguggcgcccgugguguagcccgcgcc

SEQ ID NO: 53540 - RNA, 86 nt, Bordetella pertussis
ggcgcugcgcuaucugccgcagagcacggucaugaugggcgugccuaccuauuacgugcggcugcuggccgaugcgcgcuucgacc

SEQ ID NO: 53541 - RNA, 103 nt, Bordetella pertussis
ggcgucgucgaucuccagcagcgcgcccuuggggccguggccggcgcuguugacgaccgcgucgauacggccccagcgcugcaggguggcgucgaccagcgcc

SEQ ID NO: 53542 - RNA, 84 nt, Bordetella pertussis
ggcguugaacagcaggaugucggcggccaucaggacgggauacgagaacagucccauggucacgccgucauccggcucgacgcc

SEQ ID NO: 53543 - RNA, 66 nt, Bordetella pertussis
ggcguugaagccauggcucuggccauagccgguggacaggcuguagcugaagccgucggccgcgcc

SEQ ID NO: 53544 - RNA, 58 nt, Bordetella pertussis
gggcugcggcgugcccggcggcgcgaugacgcccagccaguuggucaccucguagccc

SEQ ID NO: 53545 - RNA, 130 nt, Bordetella pertussis
gggcuuggcggcggcgccgcgcgcaucgacaucgagcucgcgguccagccauucgagcagggccggcggcagggccggccuggcgggggcggcggcggccaguucggcgcgcagcggcgccggcaauucc

SEQ ID NO: 53546 - RNA, 69 nt, Bordetella pertussis
gggcuuggggcgcgagauguagucgucgaacuccucgggcagcggcguccacaucucgugcaccagccc

SEQ ID NO: 53547 - RNA, 67 nt, Bordetella pertussis
ggucgaggccgucuuuggcguaugggcguucguacugaucgccuguauggcgcugauggccggcacc

SEQ ID NO: 53548 - RNA, 101 nt, Bordetella pertussis
ggucggcgcucagccggcgccacaccggcguggucagcggcgcauugguggguuccaugaugugcagcgccaccaggcuggucugcgccugcgcggcgagc

SEQ ID NO: 53549 - RNA, 73 nt, Bordetella pertussis
ggucuccaguuccagcccuucgaugguguagccgggcagguugcgguaguuggacaagggcuuggggcagucc

SEQ ID NO: 53550 - RNA, 72 nt, Bordetella pertussis
ggugaggauggggccgagcgcccagucgcggcccucgaagccguugaggcggucggccgucgggcccuuguc

SEQ ID NO: 53551 - RNA, 64 nt, Bordetella pertussis
ggugcagcuggccgcccagaaggccgaacugaccaucaacggcauccccguggucagcgacacc

SEQ ID NO: 53552 - RNA, 121 nt, Bordetella pertussis
gguggcgcgccagcgcgguaaccuggauguccauguacgggaacagcggcagcgccgacagcaucuggugcagcucgucguugucggcggcgucgaagaugcugacguuggcguagcggcc

SEQ ID NO: 53553 - RNA, 75 nt, Bordetella pertussis
guagcuucaacgcuucagggcagcaucucagaguuuuucuggagaaauaugcugcuaugaagcguuguuuccuac

SEQ ID NO: 53554 - RNA, 68 nt, Bordetella pertussis
gucgcagcaagcggcugagcugaaggauccgcaagacguugccucguucaccagcggcuuggugcagc

SEQ ID NO: 53555 - RNA, 56 nt, Bordetella pertussis
gucgcaggugcgcaugcccaauggccagaucaaggccgugggcgaguaccuugugc

SEQ ID NO: 53556 - RNA, 66 nt, Bordetella pertussis
gugccuguccccgcaugggggagcgacacccgcggcaagggugccuguccccgcggggacaggcac

SEQ ID NO: 53557 - RNA, 74 nt, Bordetella pertussis
gugccguucuucagggcgaccuugaacaugccgcggcgggccuguuccauugccuucugaaccgacaccggcac

SEQ ID NO: 53558 - RNA, 80 nt, Bordetella pertussis
guggcaggggccccgcggcccccugguuggaauuggcacuguagcgggaaagcaggggguugccgacgggggauugcgac

SEQ ID NO: 53559 - RNA, 83 nt, Bordetella pertussis
gugugcagcuugcgcgaggacgcacugaagcugcccagcacggcgcuccaguagaacgccucgaguugcuucaggguguacau

SEQ ID NO: 53560 - RNA, 92 nt, Bordetella pertussis
guugauggucuuguucuucauguagcucgccagcagcgucagcgagguguccgggcugaugcgccaggucagcgcgggggcgagauaguagc

SEQ ID NO: 53561 - RNA, 81 nt, Bordetella pertussis
ucaccaccuggccgucgugcaccagaaccugcuuuuccuucaggaucaggaacucguggcugacgccuuccaggucgguga

SEQ ID NO: 53562 - RNA, 81 nt, Bordetella pertussis
ucagccgauugcccugcuccugggcgcggcgcaggcgguucaucucggccagcaggugcggcgucagguugggacggcuga

SEQ ID NO: 53563 - RNA, 61 nt, Bordetella pertussis
uccugcaggaacacgagauccggccgugccucgcgcagggccucgcgcaguucgugcagga

SEQ ID NO: 53564 - RNA, 129 nt, Bordetella pertussis
uccuguaugcgggcgcgugguccgcgcgaaaccugaaugauggcgguuccgugcgucuggccgcgcgcagcgaacauuucgucuauucgcaguucgcgcaguuccuggacgcgcguuggcgcuacagga

SEQ ID NO: 53565 - RNA, 70 nt, Bordetella pertussis
ucgcgcagcgucuccaggaagccggcgagcacugucagcggcgugcgcagcucgugcgagacguuggcga

SEQ ID NO: 53566 - RNA, 58 nt, Bordetella pertussis
ucgugggccugaacgguggcggccagaucggccugggcccggagccguucgcccaugg

SEQ ID NO: 53567 - RNA, 72 nt, Bordetella pertussis
ugacgguguucggcgaugccgccauccacgccauccuggucgaaggcaugggcagccucgccgagaccguca

SEQ ID NO: 53568 - RNA, 84 nt, Bordetella pertussis
ugauggccaaggaugccggcggcggcgcgcccaaccccgaggcuccccucgaggcgggcgaagucaccgucagcaucgccguca

SEQ ID NO: 53569 - RNA, 55 nt, Bordetella pertussis
ugcgccgggcccugggcgacgcccugcgccagcugcagggccuggggcccgagca

SEQ ID NO: 53570 - RNA, 57 nt, Bordetella pertussis
uggcagcagaucgacuacggcucgcgcuauuccgagucguacauggauucgcugccg

SEQ ID NO: 53571 - RNA, 70 nt, Bordetella pertussis
uggccgaugugcagcgcuugcagccggcguuccuggccgggcgcaggcugcuggugcuggggggcggcua

SEQ ID NO: 53572 - RNA, 74 nt, Bordetella pertussis
ugguggcgcagggcagcgcgcaggaccugaucgacgcccccgagucggucaccggccgcuaccuggccaagccg

SEQ ID NO: 53573 - RNA, 84 nt, Bordetella pertussis
uguauuaccugcagcgggccuggcccgccauccgcgaaaagucgcagugagcguacgcggccgggcgcaggcccgggcaauaca

SEQ ID NO: 53574 - RNA, 75 nt, Bordetella pertussis
uugcugggccuggauggcgccgcauuguccgagcugguggggcaguggggcggcaagccguuucgcgcccggcaa

SEQ ID NO: 53575 - RNA, 78 nt, Chlamydia trachomatis
guucuaucuacguucaugucguucagaaugcaacgggcccuucuguugauuaucccgaagauauaaccaaaguggagc

SEQ ID NO: 53576 - RNA, 58 nt, Chlamydia trachomatis
guauauuuauauugcccuucuuuccugaaguugcaagauagagggcaaauagauauau

SEQ ID NO: 53577 - RNA, 75 nt, Chlamydia trachomatis
cgcuggauucucugguauuaacugguuuuuuacgcaaaaucuagcaaaacuuuuaauagcagauagucgacggcg

SEQ ID NO: 53578 - RNA, 129 nt, Chlamydia trachomatis
augagggacauaucuugauuaggauccggcgaggaagaggucuuuuauguugcgcuuguuucaacauauauuguguuuuuuagaagaagacccuucguuuguagacgucccucaagagcuuucuuuugu

SEQ ID NO: 53579 - RNA, 129 nt, Chlamydia trachomatis
agagauuucucaggcuauucaauuuuucaaucaaaacaguauggggguccacgcucuuaucaucgcaaggggcgguggaaguaucgaggaucucugggcuuuuaaugaagaagagcuaguuaaaucuau

SEQ ID NO: 53580 - RNA, 62 nt, Chlamydophila pneumoniae AR39
cggcccuaucuauaaaacaucaguugcuugcuuauggcaucuccgcaacuguuguagacccg

SEQ ID NO: 53581 - RNA, 78 nt, Chlamydophila pneumoniae AR39
gauuuuuccauauauuuagccucuccugauuauugaaaaguuggaaaucauugaaagguugaacgucgugggggacuc

SEQ ID NO: 53582 - RNA, 92 nt, Chlamydophila pneumoniae AR39
ucuuuaucucagguagagaggcaagaauacgauggcugcuaguauuuuaucucaggagcuuuuggauauccuuccuuauacuuuuuuaaaga

SEQ ID NO: 53583 - RNA, 68 nt, Chlamydophila pneumoniae AR39
uagaaguauuaagccaagauuuuauuugugcugcuaaagcucgaggauugcguugguuugauauucua

SEQ ID NO: 53584 - RNA, 56 nt, Chlamydophila pneumoniae AR39
uagcaaguaugcgauacgcaauaguguuuccaucuauaguaaguucaugcuuguua

SEQ ID NO: 53585 - RNA, 65 nt, Chlamydophila pneumoniae AR39
uaaagaagaagaauccguggaugaugaagucucagauggcucgucuacaggguucuucgcuuuua

SEQ ID NO: 53586 - RNA, 80 nt, Chlamydophila pneumoniae AR39
uaacgaaccuuuauauacccucgcucuuaagauuauggaaucugcuuuaagucguggguauguuccuggaggaggcguug

SEQ ID NO: 53587 - RNA, 106 nt, Chlamydophila pneumoniae CWL029
guuuuaaauccuuguuguauauaaaaguguaugaguuucucuucauccacaggguguuguggaaagguaagggacucuauugguacugggauagggauauuagaau

SEQ ID NO: 53588 - RNA, 110 nt, Chlamydophila pneumoniae CWL029
gaaaagacaagugacggguaggaucuuagaauguuguaggucucgggucuuuuuuucaccuggauucuuuaauuuucugaaagauuauaggaacucuucuuuuguauuuc

SEQ ID NO: 53589 - RNA, 104 nt, Chlamydophila pneumoniae J138
gaaauagugaaugagacuaaauauugaccuuuagcugcaggagguuuggccuuaauuaaagcagaacuuagagcuucaauauuuucuuugauuugacugcuuuc

SEQ ID NO: 53590 - RNA, 124 nt, Chlamydophila pneumoniae J138
cagucaucaaaacuuucaauuuuaaacacacuuuugucguauuuguuauuacuaguugucugaagagucauuuugagacccgcgaguaaagauucuaauacaguaaguugguuuaaagugacug

SEQ ID NO: 53591 - RNA, 59 nt, Escherichia coli CFT073
caguaccguuagugccguccgcuuuacccugcgccguaccgacauugauggucccacug

SEQ ID NO: 53592 - RNA, 63 nt, Escherichia coli CFT073
caguguaaaagguauguaacagaccauugacugacugaauggucugucauacuuuguuaccug

SEQ ID NO: 53593 - RNA, 79 nt, Escherichia coli CFT073
caucaugaacagcauggggaaugaucagauccggacuguuaaucugauuaaaucugcccguguuggcuauacaaagaug

SEQ ID NO: 53594 - RNA, 67 nt, Escherichia coli CFT073
caucuugcauucugguuguaaguaauggcggcacuugggccgauucuuaaaaaccggaggcaacaug

SEQ ID NO: 53595 - RNA, 56 nt, Escherichia coli CFT073
caugaugggcaugaaugucauaaccuugagugauguggcuuuucuugccgauuaug

SEQ ID NO: 53596 - RNA, 59 nt, Escherichia coli CFT073
cagcagcaguaugcagacgcuggcgaaggcaaauuugccgccguugcuuucuguuccug

SEQ ID NO: 53597 - RNA, 59 nt, Escherichia coli CFT073
cagccaguuaacgcuggcgcagcagaugcgagcugaaaaauuacgccagcgacugguug

SEQ ID NO: 53598 - RNA, 67 nt, Escherichia coli CFT073
ccaggcugaagguguuuuucagauccgcaccgagacacagcacaggcggaacauuuuuaaagcccgg

SEQ ID NO: 53599 - RNA, 100 nt, Escherichia coli CFT073
ccauaugcacaucaaucgcuaugccugcaugaacgcgaaaaccaucgcggcuuguuguucauguaugcauguuugcugggggcgaugauguguuuuaugg

SEQ ID NO: 53600 - RNA, 63 nt, Escherichia coli CFT073
ccacgcccaguccgccgcgcauuuuccccaccagaacguuggcaaugugcaggaugcguucgg

SEQ ID NO: 53601 - RNA, 70 nt, Escherichia coli CFT073
cauuauggcgcugauggugauguccugcugcgguucgcugcuuggcuggcaguucaccauugcccaggug

SEQ ID NO: 53602 - RNA, 66 nt, Escherichia coli CFT073
cauuucauguguugucagugcaguggggugccgugggugucccacaaugccaauacacuugaaaug

SEQ ID NO: 53603 - RNA, 65 nt, Escherichia coli CFT073
ccaauaugcaaaacugcggcgcauuacgaauugaucacgugaugucgaugcugcguuuguggugg

SEQ ID NO: 53604 - RNA, 82 nt, Escherichia coli CFT073
augcaccaccaauagcaccgagaacaguaccgcgcugaccauuaagaucacagugguacucaauuucaucggacguuugcgu

SEQ ID NO: 53605 - RNA, 100 nt, Escherichia coli CFT073
aucuugucagaaccggcgcguuucugguggcgaugucccuguggcauaaccauccacagaaaacgcagucaccgucaaugaaugaggccgugaugaagau

SEQ ID NO: 53606 - RNA, 65 nt, Escherichia coli CFT073
augaauauuuagacuaaagaguuuguaacgcuauguaagugauuuuuucugguuuagauauuuau

SEQ ID NO: 53607 - RNA, 55 nt, Escherichia coli CFT073
auccuuaaccaugccgauaacgugauuaaucaacaaacgcgcaugcgucagggau

SEQ ID NO: 53608 - RNA, 111 nt, Escherichia coli CFT073
aucaguuauuaauaucgguagaaugacaaucgacggcuuuagauacugauaucuacgcauugaacgguauuuaacgccgucagaaaugucauuacuuuguuaaauauagau

SEQ ID NO: 53609 - RNA, 67 nt, Escherichia coli CFT073
auaguaagguuguucacuguaaggguuguaaacuucccauuaucaccaguaaaacgcaccauacugu

SEQ ID NO: 53610 - RNA, 86 nt, Escherichia coli CFT073
auguaucaacagauucagcaggaagaugccucucaguugcggcacauuugccugacagauaugguacuucccgcugaugauggcgu

SEQ ID NO: 53611 - RNA, 101 nt, Escherichia coli CFT073
auguuucaaaugcacaaaacuuuuauacucuaagaaaucaggauugcaccaguacaagcagccugauguuugacgaguauuuaacuuguuaugaauaacau

SEQ ID NO: 53612 - RNA, 61 nt, Escherichia coli CFT073
caagguaacgucugguccuguaaccagcuugguuauauguauuccagagguuuaggcguug

SEQ ID NO: 53613 - RNA, 100 nt, Escherichia coli CFT073
caaauucaguuuucaucguaguaucacuuuaucagccaagucauaaaguucagcuguauuuugggagguaaagcgauauuaugauuauauuuuauguuug

SEQ ID NO: 53614 - RNA, 82 nt, Escherichia coli CFT073
caacgugucgacacucuuccucuuuauuuacaugcuuaugccuuucauuuaaauaugcgacuggaaagaguguugccugcug

SEQ ID NO: 53615 - RNA, 59 nt, Escherichia coli CFT073
caacugagaggcucuuugcuaaguguacggaaaugcuuaaaucgagagccuccuaauug

SEQ ID NO: 53616 - RNA, 69 nt, Escherichia coli CFT073
auuugcuccguaaaacgcaaucaaaaugaggguauuugcgcuuacggugagcuuuuuacguggguuugu

SEQ ID NO: 53617 - RNA, 65 nt, Escherichia coli CFT073
auuuuauggcggaacggcguugcugccaguaauuccacaccaauguugucggucgccauauaagu

SEQ ID NO: 53618 - RNA, 123 nt, Escherichia coli CFT073
cacgcguagccugcgggcuaagcaguaccagcgguuugccuaaaucaugcuguaauaaauggcgugcgugccaggccaguugauuugggcuauggcggacaaaauaguuagcgcgacagcgug

SEQ ID NO: 53619 - RNA, 68 nt, Escherichia coli CFT073
cacggagccgcgcaucaccuguaaugccuggcugaccacgcagcguaaggcgugggaugugcucagug

SEQ ID NO: 53620 - RNA, 55 nt, Escherichia coli CFT073
cagaaagugaugcuuccuccagcuuuugcagcgagagauucagcaucucuuucug

SEQ ID NO: 53621 - RNA, 57 nt, Escherichia coli CFT073
agaucucuucgccaaagugcaguucuuuuugcacauaguuguggugacaguugaucu

SEQ ID NO: 53622 - RNA, 58 nt, Escherichia coli CFT073
agauuggugucaaucauguguugcaggaugccgggauucaggugauugaaaccgaucu

SEQ ID NO: 53623 - RNA, 88 nt, Escherichia coli CFT073
agcaacugauuaugaaucucucagguggaaaucagcaaaaagccauucugggccgcugguuaucggaagagaugaaggucauuuugcu

SEQ ID NO: 53624 - RNA, 55 nt, Escherichia coli CFT073
acugcgaaucgggaauuaucuuugacaacgaugaggauaaaacagauucggcagu

SEQ ID NO: 53625 - RNA, 71 nt, Escherichia coli CFT073
agcgauuccgacuucauggagucgaguugcagacuccaauccggacuacgacgcacuuuaugagguccgcu

SEQ ID NO: 53626 - RNA, 56 nt, Escherichia coli CFT073
agcgcaaauugcgcagguguaaaguuugauacaccaaaaugacgcacuuugccgcu

SEQ ID NO: 53627 - RNA, 112 nt, Escherichia coli CFT073
agccuaccaaucagaagguagcauguguaguaucgcaaacauaaagagaaacugcucaugaauuauguuaucugcacuaccauugucgcccuuggucucauucugacaggcu

SEQ ID NO: 53628 - RNA, 73 nt, Escherichia coli CFT073
agcgccgccaguuugcuggacucugccaguucacuacgcguaauuuguaauacuuguucagcuugacugcgcu

SEQ ID NO: 53629 - RNA, 61 nt, Escherichia coli CFT073
agcgggacguagaagcugacgacguugccaaaucgcugacgggucagacgcugcgcccguu

SEQ ID NO: 53630 - RNA, 61 nt, Escherichia coli CFT073
agccauauugaaggggcgagcaaacaaagugauuuuguucaggcggguuaucaguaugguu

SEQ ID NO: 53631 - RNA, 80 nt, Escherichia coli CFT073
agcugaacaauuauugcccguuuuacagcguuacggcuucgaaacgcucgaaaaacuggcaguuuuagauugauuugguu

SEQ ID NO: 53632 - RNA, 82 nt, Escherichia coli CFT073
aguggaaaauugcacagaggaaagcuguugggacuguaauuauugcauucggcccagcuuuucccucucucguagugccauu

SEQ ID NO: 53633 - RNA, 88 nt, Escherichia coli CFT073
aguguuggcgacaucgacguggugaaaucgccgacaaucucuucgagaauaucuucgaccgucaccagucccugaaugucuccauacu

SEQ ID NO: 53634 - RNA, 110 nt, Escherichia coli CFT073
auacaaccugggggccgauuucucucugccugccgaggccaaagauaaaaaaaucauccuggugccgggucagguagaagacgaugccucaauuaaaacaggcacugugu

SEQ ID NO: 53635 - RNA, 83 nt, Escherichia coli CFT073
aggcagcaaggauuugcgugucaaucaaggguugugguaauucgccaaagacauugaggaacacuuccagaucuucacugccu

SEQ ID NO: 53636 - RNA, 81 nt, Escherichia coli CFT073
acgaccugauucaguugauacugauuuuccugaaucugaccacgcagggaaucaauaucggauugauuaucagagaguugu

SEQ ID NO: 53637 - RNA, 70 nt, Escherichia coli CFT073
acgccuuauccggccuacaaaaucgugcaaauucaauauauugcaagaagaucguaggccugauaagcgu

SEQ ID NO: 53638 - RNA, 83 nt, Escherichia coli CFT073
acgcucgaccgugaaaucacgcugccauccuccgguaccacgcugauaagccugguugacggaaguggcaauccggucagcgu

SEQ ID NO: 53639 - RNA, 60 nt, Escherichia coli CFT073
acgcugcaccggauaaaucaacagcguuucgcuggcgagaucuuccgguguaauacgcgu

SEQ ID NO: 53640 - RNA, 72 nt, Escherichia coli CFT073
accuuuggcuucagcguuuugcaggaaaccacgcaucugauggaaaaccugcucgaugaagccagacgaggu

SEQ ID NO: 53641 - RNA, 68 nt, Escherichia coli CFT073
acggcucgaacgcagugaaagagcacggcuuccaaugccaugucggaucgaugcgcucgccaagccgu

SEQ ID NO: 53642 - RNA, 58 nt, Escherichia coli CFT073
acggcugagagcaccaccagagaacauguuaaacaucucaaugauggugccucgcugu

SEQ ID NO: 53643 - RNA, 106 nt, Escherichia coli CFT073
acguacgcugaaccugacugcucucuaucgcggcguuacgccggugcacuuugauagcgcuaaugacgguguagcagcugccagcgaagcgguuaaucugcugcgu

SEQ ID NO: 53644 - RNA, 68 nt, Escherichia coli CFT073
accccauacagaaagcuuauaaugcgaucugcuucacuaaaguggcauuauuucuuuuuguugguggu

SEQ ID NO: 53645 - RNA, 77 nt, Escherichia coli CFT073
aaucaugagcaucgaaacguucgccuuucagggcaacaaacaggcagcccggcgucaguuuucgcgugucagugguu

SEQ ID NO: 53646 - RNA, 87 nt, Escherichia coli CFT073
acagguucggcagcggcggcgacagggaccucagucaccaucggcugcacuuguacuucuuccuguucgcgcugcucuucaaccugu

SEQ ID NO: 53647 - RNA, 96 nt, Escherichia coli CFT073
acaucaacagcguaucgaagaaaauuuugcuauuugggauuucucacugacagagaaagaaauggcgcaaauuaguucgcuugauuuggguuaugu

SEQ ID NO: 53648 - RNA, 81 nt, Escherichia coli CFT073
aaauacugcucggcgaucuaucagccaacgcccacgaauuuuuuguggccuuggaacgauguauccuaguuuuccguauuu

SEQ ID NO: 53649 - RNA, 75 nt, Escherichia coli CFT073
aacaaauauaaaguuccgcguauugcguucguuaacaaaauggaccgcaugggugcgaacuuccugaaaguuguu

SEQ ID NO: 53650 - RNA, 66 nt, Escherichia coli CFT073
aaaaguggaaacagguuaucccgguguccugauuuugugcuccacuacagaacuuguaucccuuuu

SEQ ID NO: 53651 - RNA, 72 nt, Escherichia coli CFT073
aaaauagucagaagaguaagaucaauauuucguaagguuguaaauauuugugguuuaccuucugacgauuuu

SEQ ID NO: 53652 - RNA, 81 nt, Escherichia coli CFT073
aacgauaccgauauggcaaucaucgacaaacgucguccgcgugcgaacguuucccaggugaugcauaucaucggugacguu

SEQ ID NO: 53653 - RNA, 62 nt, Escherichia coli CFT073
aagcccauaucuugugcuuguggcugaucggugcgaucgccgccugcauucagaugcagcuu

SEQ ID NO: 53654 - RNA, 110 nt, Escherichia coli CFT073
aagcccguacucuggucacgcucuuauuucaucgguucaugugguggagcaccgcuggaaguugugaaaaaguauauucagaaucagcguggcugauaaacugcgggcuu

SEQ ID NO: 53655 - RNA, 94 nt, Escherichia coli CFT073
aagguguugagcccuuuuucuuccagcauguagcggcaaauggcuucgauuucaugcggaggacagccgugcaugguggagaggguaaccccuu

SEQ ID NO: 53656 - RNA, 65 nt, Escherichia coli CFT073
aaguuacaucaacaaacucaggcgccuugcccgacaggagaaugacuuuauugauguacacgcuu

SEQ ID NO: 53657 - RNA, 66 nt, Escherichia coli CFT073
aaguuugccguggcaguggcgauggggacaaugaucuucaccgucggcggugcgacggucgaauuu

SEQ ID NO: 53658 - RNA, 93 nt, Escherichia coli CFT073
aauaacacucgcuucggccucucuugcggucugguuucccccgagcgggaaaaauucgaucaacuguugcugggggcacgggcggggauuguu

SEQ ID NO: 53659 - RNA, 61 nt, Escherichia coli CFT073
gaaagugacggauuuaacgcggcgaguauugaugucgccuucguugaugauggucgcauuc

SEQ ID NO: 53660 - RNA, 76 nt, Escherichia coli CFT073
gaaaaugagcgccgccuguuuuucuucagcgccaaaacgccauuagcccuuagacaacaguuggaugcucauuauc

SEQ ID NO: 53661 - RNA, 69 nt, Escherichia coli CFT073
gaaaccuggauggugcauauuugcggcaucguuuugcuugcuggucgucugaugcauuauuacgguuuu

SEQ ID NO: 53662 - RNA, 130 nt, Escherichia coli CFT073
gaacguugucccucgugccuucgaacguauuggcgguacgguguuggguucgauuuuaggucuuaucgcucugcaacuggaguuaauuucguuaccgcugauguuagucuggugcgcggcggcgauguuu

SEQ ID NO: 53663 - RNA, 55 nt, Escherichia coli CFT073
gaacugguuucgcuuucuuaaagccuucuuuaaaggcgauagaagcagccaguuu

SEQ ID NO: 53664 - RNA, 57 nt, Escherichia coli CFT073
gaaguggcagcgcagcagguuucugaucaacagcuggaaacugcccgcuuccgcuuc

SEQ ID NO: 53665 - RNA, 69 nt, Escherichia coli CFT073
cuguuuacggcuuacggcgcacgaguaaaaaucguuuaucuugaagugccaugggcgcaauggaagcag

SEQ ID NO: 53666 - RNA, 71 nt, Escherichia coli CFT073
cuucaaguugcaugugcugcgacucgaauuauuuagaguuugaaaggguuagcaguauaugagcaccgagg

SEQ ID NO: 53667 - RNA, 73 nt, Escherichia coli CFT073
cuuccgccgucaugauaaaacucacuaaacugucgauacguacaguauaggguuuuuauacagugcacggaag

SEQ ID NO: 53668 - RNA, 62 nt, Escherichia coli CFT073
cuucuucuuuagccgcuucaauauacgaagguggaauagaaagcaggcagcuaaagacaaag

SEQ ID NO: 53669 - RNA, 56 nt, Escherichia coli CFT073
cuucucuucaaucgggauuaucgcgggugcgguuaaaggccugaaugaagagcaag

SEQ ID NO: 53670 - RNA, 82 nt, Escherichia coli CFT073
cuuuguuauuuuguuaagcuuugcacuccauuuaucaauaguauuuugaacgauggugucagguuuaaauugaucugcaaag

SEQ ID NO: 53671 - RNA, 64 nt, Escherichia coli CFT073
gagaaauaccaucaaaaucgugaguguugucagcauuuucaccgguauuuggggcuguuucauc

SEQ ID NO: 53672 - RNA, 71 nt, Escherichia coli CFT073
gagaguugauucaugaaaucgacauguacgcacccgauguggucgugcuggcugguuuuaugcgcauucuc

SEQ ID NO: 53673 - RNA, 80 nt, Escherichia coli CFT073
gagagcgaaggacugaugccuggcagccacuucaaaaguaugcaguuuugauaguugccagccguuaagcagucgauuuc

SEQ ID NO: 53674 - RNA, 56 nt, Escherichia coli CFT073
gacguuuucuccuuuuuugaugcgguacugcaacucaucaaaaggcagauaacguc

SEQ ID NO: 53675 - RNA, 57 nt, Escherichia coli CFT073
gacucuccgcuaucugcugcugauacgccugcgcuauccacaccggacgugagaguc

SEQ ID NO: 53676 - RNA, 97 nt, Escherichia coli CFT073
gacgcauugcguucuguacagcacgcuucauagcacgacggaacauaacgcgacguuccagcugagaagugaugcugucagcaaccaguuuugcguc

SEQ ID NO: 53677 - RNA, 59 nt, Escherichia coli CFT073
gaauaaacacugcacuguguauucauuccaacgagugaauacacggagcaaugucgcuc

SEQ ID NO: 53678 - RNA, 86 nt, Escherichia coli CFT073
gaaucgagauguucugcucuuuagccgcagccaggucugccggagucaggcucaguacgcagcugaagacgaagaacauuacgguc

SEQ ID NO: 53679 - RNA, 77 nt, Escherichia coli CFT073
gacauagaaauauuugcccggcgcguucggaauuucaaaaccgaaauaaggcgcgucgcgggagauaucccacuguu

SEQ ID NO: 53680 - RNA, 76 nt, Escherichia coli CFT073
cugugaucauaaugguacacuuuauaggaauuacagcggggagaauguacuguaacuguugccauauggucuccag

SEQ ID NO: 53681 - RNA, 60 nt, Escherichia coli CFT073
cuguacggcguggugaacccgcguauucgucauaagaaguaaggggacaucaugucacag

SEQ ID NO: 53682 - RNA, 86 nt, Escherichia coli CFT073
cuguuguccuggauauuuauacaucccaauaaagcauguaugccauauccauuuuaugaugugugaaaaguuaguucagguaauag

SEQ ID NO: 53683 - RNA, 60 nt, Escherichia coli CFT073
cuggcgagccacgcauuaagcuguuuuccggcaucagcuucagaguuccggcugcgucag

SEQ ID NO: 53684 - RNA, 78 nt, Escherichia coli CFT073
cugcuggaaaacugucugaaguggauuuuaaagggguuaagcaggcauuagccaaaaugcauuauacgguucuggcgg

SEQ ID NO: 53685 - RNA, 69 nt, Escherichia coli CFT073
cucuuuuccuccagguacggacccgcguauuuccaucaacgugcuggagucugccggacuggaagugag

SEQ ID NO: 53686 - RNA, 83 nt, Escherichia coli CFT073
cugaaaguuaaugauguuuuaagcucugugagcgaauuaaugcuuucgcucauaaucagaucuaaaacgguaauaacuuacag

SEQ ID NO: 53687 - RNA, 72 nt, Escherichia coli CFT073
cguuguuguaaugcggcuuccagcgugauggcacuuaauaacgugguauuauuucugccgcguugcaaaccg

SEQ ID NO: 53688 - RNA, 56 nt, Escherichia coli CFT073
cuccuuuguaacguugcaggaugucgguggccguauucaacuguacguugcaagag

SEQ ID NO: 53689 - RNA, 86 nt, Escherichia coli CFT073
cgugguaugcguuacaccuugaguacccgccgggccgacaacaaagucagguugcgcaggcaggguaaucggggaaggauuccacg

SEQ ID NO: 53690 - RNA, 121 nt, Escherichia coli CFT073
cgugguugggauauuacggcauaguuauucacacucccuucacuuacuccacuuaaauuggcacgcaaagguaaguaaagggaguuugauaugucuguuucacgucggguaauucaucacg

SEQ ID NO: 53691 - RNA, 66 nt, Escherichia coli CFT073
cguuccaucucgguguggauggcggcauugaaguuaccgccagccauaacccgauggauuacaacg

SEQ ID NO: 53692 - RNA, 85 nt, Escherichia coli CFT073
cgugcgggccaaucaucgaggugugcaaagacugauagccguucgcuuuuggaauggcgauauagucuuucacgcggcccggacg

SEQ ID NO: 53693 - RNA, 56 nt, Escherichia coli CFT073
cguacccagguggagacguucuccagcgccuggcgauaagucucuuccuggugacg

SEQ ID NO: 53694 - RNA, 57 nt, Escherichia coli CFT073
cgucacgcugguggaucagggcggacaucuguuaacccaguccaacaccagcgggcg

SEQ ID NO: 53695 - RNA, 57 nt, Escherichia coli CFT073
cgucauccuggugguuuucaccugauaaacgcagcagcugaaaggcgcuggaugacg

SEQ ID NO: 53696 - RNA, 95 nt, Escherichia coli CFT073
cguccguuugccgguuugccggugccaucaagguuugucacgguaauaucacuguuaaauuguuuaaugguauugaccagcaugguaccuggacg

SEQ ID NO: 53697 - RNA, 71 nt, Escherichia coli CFT073
cggaaaccguacagaaaaaguuuggcaucuucggcgaaccgaugaugguuggcacuauucugggcauucug

SEQ ID NO: 53698 - RNA, 62 nt, Escherichia coli CFT073
cggcggcaacguggcaacugcugcaggugcccgcgcgcuggcagaagccgguugcagugccg

SEQ ID NO: 53699 - RNA, 71 nt, Escherichia coli CFT073
cggcugacccagugcuaacaaauguucugccaucgcgaacaauuucucugcacuggcuuuucccucggccg

SEQ ID NO: 53700 - RNA, 62 nt, Escherichia coli CFT073
cgggaaagcaguuccuuuuggcucugucguuacggccagaaacggggggagcaguaucgccg

SEQ ID NO: 53701 - RNA, 78 nt, Escherichia coli CFT073
cgggcguggcaggaucugucuccucauggacucacgcagcuuaucuguucuaagccagaggcgacgccugccgcuucg

SEQ ID NO: 53702 - RNA, 104 nt, Escherichia coli CFT073
cgguaaacaguacgcaucagcgacaugcccugguguuuaucgaucuugaucgcuuuaaagcggugaaugacagcgccgggcaugcggcgggcgacgcuuuacug

SEQ ID NO: 53703 - RNA, 67 nt, Escherichia coli CFT073
cggugauuaucgcuggucugcugccgauucuguggggaacaggagcagggucagaggugaugagccg

SEQ ID NO: 53704 - RNA, 102 nt, Escherichia coli CFT073
cgccgcgcggaguauuuuucuggcgagcuggaaaccuuccugcugauggcgcgcgacgagcaggacgauccgcucaaucugaaagguuccuuugccggggcg

SEQ ID NO: 53705 - RNA, 91 nt, Escherichia coli CFT073
cgccaucugacgcaggcgaauguaauagagcguuuugauacccuugcgccaggcguaaaucugcgcuuuguugauaucgcgagugguggcg

SEQ ID NO: 53706 - RNA, 64 nt, Escherichia coli CFT073
cgaucguggcggaaaauugcugccacacgaguaucgauauguggcauauguucgcgcauggucg

SEQ ID NO: 53707 - RNA, 57 nt, Escherichia coli CFT073
ccugguucgggucgcgcuuguugauauagccagagagcaggcagcgaccggaguagg

SEQ ID NO: 53708 - RNA, 72 nt, Escherichia coli CFT073
ccuuucaauacuuaucgauuccuuugcaaggaucgccaguuccgccacaaagaguugauaaaaaucgacagg

SEQ ID NO: 53709 - RNA, 119 nt, Escherichia coli CFT073
ccugccaauuaaucaggaauccgcagccacuaagcguuuucucgcgggggauauugauaucaccgaauccuucccgaaaaauauguaucagaagcuguugaaggauauuccggggcagg

SEQ ID NO: 53710 - RNA, 75 nt, Escherichia coli CFT073
ccugcgggcauuucgcuugauaaagaucgaucauuuuuuuaaucgucaguuuuucacgagagauacgcuugccgg

SEQ ID NO: 53711 - RNA, 62 nt, Escherichia coli CFT073
ccgcuguugccguccaucaucgacacugccacgucguuggaugcgcagauggcauacagcgg

SEQ ID NO: 53712 - RNA, 80 nt, Escherichia coli CFT073
ccggcuggugaaaaugcucggccucgaaccgggcuuuauuaucugcccguuccgcggcgaguauuuccgccuugcgccgg

SEQ ID NO: 53713 - RNA, 64 nt, Escherichia coli CFT073
ccggggauucuggcggcgguagaccgagagauuuuugguuccucggauaccgaugccgauccgg

SEQ ID NO: 53714 - RNA, 55 nt, Escherichia coli CFT073
ccgacuugcauaagauaaacgaauuguucauuguuuaugcucauuuguaggucgg

SEQ ID NO: 53715 - RNA, 96 nt, Escherichia coli CFT073
gauugccggaugcggcguaaacgccuuauccggccuacaaaagcaauaauuucaacagauuuugcaggccugauaagcguagcgcaucaggcaauc

SEQ ID NO: 53716 - RNA, 63 nt, Escherichia coli CFT073
gauuccgcccgccaguaaaccggacuucacaccuaacaaccacggucugguggugcgcggauc

SEQ ID NO: 53717 - RNA, 65 nt, Escherichia coli CFT073
gcaaauuuuaccucguugguaucaucagugguuuggcgugccaguggauaacggguagaauaugc

SEQ ID NO: 53718 - RNA, 82 nt, Escherichia coli CFT073
gcaagguuaaccacaugaaaaucauuaugguaacauaugaggcuuuccaaaccaccugaucauuuucauugguuaacucggc

SEQ ID NO: 53719 - RNA, 72 nt, Escherichia coli CFT073
gaugauuauguuguugauaucccgcaaaauaccuggaucgaacagccgugggauaugggcgucguauucguc

SEQ ID NO: 53720 - RNA, 58 nt, Escherichia coli CFT073
gaugcguuuaugccaguaugguuuguugaauuuuuauuaaaucuggguuaagcguguc

SEQ ID NO: 53721 - RNA, 56 nt, Escherichia coli CFT073
gcagcagcgccuguucaagcgcagaaaauccauugucugaauccugcgcugucugu

SEQ ID NO: 53722 - RNA, 59 nt, Escherichia coli CFT073
gcaggauaaugaauacagaggggcgaauuaucucuuggccucgcuggucguuauccugc

SEQ ID NO: 53723 - RNA, 76 nt, Escherichia coli CFT073
gcaauuugcgauaggagucugggguaaaguugacgucuucgacacauuucuucccggcuccgaagcgguacauugc

SEQ ID NO: 53724 - RNA, 65 nt, Escherichia coli CFT073
gcacacagggcugaugauguucccaguuuaacggacuucggauccauaacaucggccaugugugc

SEQ ID NO: 53725 - RNA, 56 nt, Escherichia coli CFT073
gcacagaagugguauaugcguucucccuuacgaagccuugcauaauccuucugagc

SEQ ID NO: 53726 - RNA, 75 nt, Escherichia coli CFT073
gcacauaucggcgcucacgcgccguuuaccguaccggaugccggucuggagaugcugcgugaagccgugaaaagc

SEQ ID NO: 53727 - RNA, 56 nt, Escherichia coli CFT073
gcacgggcgacauuuggcaggcuucauucacgccugcuauucccgucagccugagc

SEQ ID NO: 53728 - RNA, 130 nt, Escherichia coli CFT073
gcagacgcuuggcggcguggguugccaccuguaucaggaguuugaaggccauugucugacggcgucgcagcuggagcaggccaucacgaccuugcugcaacgccacccaaugcugcauaucgccuuucgc

SEQ ID NO: 53729 - RNA, 88 nt, Escherichia coli CFT073
gcagaguugcgcgugcaggcgcaguaagggguagcaacaaugagucagaauguuuaucaauuuaucgaccugcagcgcguugauccgc

SEQ ID NO: 53730 - RNA, 87 nt, Escherichia coli CFT073
gcagauccaucuguuaccguuucaucaguacggcgagccgaaauaccgccugcuggggaaaacauggucgaugaaagagguuucugc

SEQ ID NO: 53731 - RNA, 91 nt, Escherichia coli CFT073
gcagaugaaaaccugcauucauggcgaucaggugcuggcucagccgcugggcgcugaccguaaaggucgucgugaagcgcguauuguccgc

SEQ ID NO: 53732 - RNA, 59 nt, Escherichia coli CFT073
gagcgacauugcuccguguauucacucguuggaaugaauacacagugcaguguuuauuc

SEQ ID NO: 53733 - RNA, 73 nt, Escherichia coli CFT073
gauagcccgccgccguagccgcacguugacauaaauuaugaaaacucugcggcauggcgggccacgguuuauu

SEQ ID NO: 53734 - RNA, 55 nt, Escherichia coli CFT073
gauauuuuacgcgcaauaacuguuuggcgcauuaguuguuugagcggaaaauauc

SEQ ID NO: 53735 - RNA, 58 nt, Escherichia coli CFT073
gaugaacuugcgcaccuaaucggcuaaauuguugaauaacagacagugccaguucauc

SEQ ID NO: 53736 - RNA, 81 nt, Escherichia coli CFT073
gccguguuugucgccuauuauguguuggguauacgucagcauaugagcauggggacgaugcucacacauacggaaaauggu

SEQ ID NO: 53737 - RNA, 61 nt, Escherichia coli CFT073
gccgguaauauugccugccggauaacgcaucagacgcgaggcauccucaauauucaccagc

SEQ ID NO: 53738 - RNA, 58 nt, Escherichia coli CFT073
gccggugaaacgcgcgaaauuugcacuuucccaccggcaaaacgugauuuuuacuggc

SEQ ID NO: 53739 - RNA, 90 nt, Escherichia coli CFT073
gccgcuggcgauugaucauuuucgcuauuuugccucguguauucgggcgcaggaaggugggaucagugaaauugauagcgaaaccguggc

SEQ ID NO: 53740 - RNA, 82 nt, Escherichia coli CFT073
gccggacccggcaaacagccccauacgcugcccgcguccgacgguaagcagggcauugauugggcgcacgccgguguccagc

SEQ ID NO: 53741 - RNA, 102 nt, Escherichia coli CFT073
gccggaugcaacgcuggcgcguuuuauccggccuacaaugagcacaacauacugauuuguaugguuuuguaggccggauaaggcguucaagccgcauccggc

SEQ ID NO: 53742 - RNA, 63 nt, Escherichia coli CFT073
gccgagcagcaacgcuggcuggagcaccgccgccaggucuucacgccagaguuuuugcagggc

SEQ ID NO: 53743 - RNA, 58 nt, Escherichia coli CFT073
gccagcuguucggcuaaggauuccagcguuacaggcguuuccuguuccagcagucggc

SEQ ID NO: 53744 - RNA, 59 nt, Escherichia coli CFT073
gccaguuggguaccgauauuucgccgcaacucccuugcgaagaaauugaugccucuggc

SEQ ID NO: 53745 - RNA, 57 nt, Escherichia coli CFT073
gccauauccggcuggcgaauccccgcacggcggagagcgaguccagccugaugcugc

SEQ ID NO: 53746 - RNA, 91 nt, Escherichia coli CFT073
gccagucccgcagucggcgcggaaagggguauuggcauugacguucgucaugcugggauuaaccuucuuuuccgccaguauguggaccggc

SEQ ID NO: 53747 - RNA, 69 nt, Escherichia coli CFT073
gcccagcagacaaacagcgucgaggugacgugaucuuucgaccacuccagcaccuguuugaucugcggc

SEQ ID NO: 53748 - RNA, 64 nt, Escherichia coli CFT073
gcccauaaagugaucuucuaagcccgcacggauaaucuggcggucguuguagagauacuccggc

SEQ ID NO: 53749 - RNA, 63 nt, Escherichia coli CFT073
gccacgcgcaguugcccaaagguacgcguccacuaaugcuaaauuuugaccaacagugcuggc

SEQ ID NO: 53750 - RNA, 79 nt, Escherichia coli CFT073
gcaugcacuuucccugugacaaugauacagucaaaaauaagcuuuaauauuguaucccugauuauucagaaaggcaugu

SEQ ID NO: 53751 - RNA, 63 nt, Escherichia coli CFT073
gcauguacaugcagcugauaaucugaccuuuaaaggaaaacugauuauuccugccuguacugu

SEQ ID NO: 53752 - RNA, 56 nt, Escherichia coli CFT073
gcaguaacacuuccgcacugaccaguuuaccgcuggucaucucgaccuguggcugu

SEQ ID NO: 53753 - RNA, 79 nt, Escherichia coli CFT073
gcauaauugaagggauguuaauggcauuagauauccgguuagauauggauaucguugcuaauaauucuaauugauaugc

SEQ ID NO: 53754 - RNA, 76 nt, Escherichia coli CFT073
gcauccgaauucguuuauuuucgaacguauacauacaaauauguacaauaauaagcgaaauaauuuuuggauaugc

SEQ ID NO: 53755 - RNA, 60 nt, Escherichia coli CFT073
gcuugaugaugagcgucgcgggcugcuugccagccgcuuaaaagcgacgcaaucacaggu

SEQ ID NO: 53756 - RNA, 85 nt, Escherichia coli CFT073
gcuuuugcugugcuaguuugcuuucaaaaugaaaguaaagauucucuuucuucauuuuguaaggcgaacgaccaauaacaggagc

SEQ ID NO: 53757 - RNA, 64 nt, Escherichia coli CFT073
ggaaaacgugcugcugcauaagcugccggugaaacgccugcaacuggcugauggcagcaccgcc

SEQ ID NO: 53758 - RNA, 60 nt, Escherichia coli CFT073
gcugguuaagcguauuagccaacguaagaaagagauguuggcggcugaagcuuaauuagu

SEQ ID NO: 53759 - RNA, 123 nt, Escherichia coli CFT073
gcuguuaagucaguacgccgguucuaccugcgaacuggauagccaggcaggguuguauaacccagguaugcaauggcuggcauccggcgugcuggaaugggugagaaaacuguucuggacggc

SEQ ID NO: 53760 - RNA, 71 nt, Escherichia coli CFT073
gcuguucuacacgcgcugcuucaacauuguaggcaauacgcuccacagggcuguagcaugcgucgaccagc

SEQ ID NO: 53761 - RNA, 68 nt, Escherichia coli CFT073
ggaagucauugagcccgagaucagugaucgacacuccgguuuucaggucuuccagcucaaucacuucc

SEQ ID NO: 53762 - RNA, 70 nt, Escherichia coli CFT073
ggaaguuacguugauauuguggucaagcgcgguaaccgcgugcgcuccaacguuaaccuguacgacuucc

SEQ ID NO: 53763 - RNA, 56 nt, Escherichia coli CFT073
ggaaguugaugaucauaugcucgccgcgcugggcugcauggcuguuaucaucuucc

SEQ ID NO: 53764 - RNA, 69 nt, Escherichia coli CFT073
gcugguauuuucaaucgguacgacggcauagucggccuggccgguuuccaccugauuaaaaauaucggc

SEQ ID NO: 53765 - RNA, 56 nt, Escherichia coli CFT073
gcuggguuggggagaaauaagccacucugaaauggagcgauuucugcucauccagc

SEQ ID NO: 53766 - RNA, 65 nt, Escherichia coli CFT073
gcugggcuggaacuacugguacaacugggcggugacuauugccguugaccugguugcagcacagc

SEQ ID NO: 53767 - RNA, 65 nt, Escherichia coli CFT073
gcugggggacguauagacucaacuccuuacaaagaaaauguagggcugcuugcuguucuccaugc

SEQ ID NO: 53768 - RNA, 73 nt, Escherichia coli CFT073
gcuggccaguuucuccugcaaugacaaaccacuccaggcccagguuguucccgcaggaagacuguuugccagu

SEQ ID NO: 53769 - RNA, 130 nt, Escherichia coli CFT073
gcuggaagaggcguuacgcuuaggggcagacguuguuggggcgauuccgcauuuugaauuuacccgugaauauggcguggagucgcugcauaaaaccuucgcccuggcgcaaaaauacgaccgucucauc

SEQ ID NO: 53770 - RNA, 62 nt, Escherichia coli CFT073
gcugacgagguuucaugggcgugauuaccugauuuagguuucaaaaugauaacuucgcaagc

SEQ ID NO: 53771 - RNA, 82 nt, Escherichia coli CFT073
gcugacguugcggggagcgggagaaauggacguauccugaaagaggauguacagcgcguuacuccugcaccagucauucagc

SEQ ID NO: 53772 - RNA, 57 nt, Escherichia coli CFT073
gcucuaacgccagcugcgaaguggaguuucaggaugccauuggcugguuguuggggc

SEQ ID NO: 53773 - RNA, 65 nt, Escherichia coli CFT073
gcucuucaaaaccggcuuuuugcaaugcaucacgcauuacgucaauuucagccgguuuuucgagc

SEQ ID NO: 53774 - RNA, 74 nt, Escherichia coli CFT073
gcuccaucgccagcaucgugucuucauagcccugcugacgccaggugucgauaugugccgauguaaaacugagc

SEQ ID NO: 53775 - RNA, 86 nt, Escherichia coli CFT073
gcguuauugaggcugcgcagcagucgccaguuuauaaaauggcgauggaauggaaacuggcgcugccgcugcauccggaauaucgc

SEQ ID NO: 53776 - RNA, 76 nt, Escherichia coli CFT073
gcguuccggucugacauaagggcacugcugaccgugcuccgucagcccgucgucaguguguucaaaccagggacgc

SEQ ID NO: 53777 - RNA, 59 nt, Escherichia coli CFT073
gcguagcggguuugcuuacacccuccgguuaaggaauguacaaucaaaccaguugacgc

SEQ ID NO: 53778 - RNA, 56 nt, Escherichia coli CFT073
gcgggcgaggcgcauagacguugcguaacgcuucaauuucaaucgcgucgcccagc

SEQ ID NO: 53779 - RNA, 77 nt, Escherichia coli CFT073
gcgggcgguauuauuucugcggcagguuuuaccugguuugcaaaggaggaaccgcccgcagaaaaaacgucgaccgc

SEQ ID NO: 53780 - RNA, 74 nt, Escherichia coli CFT073
gcggcaauucugaacuacagccguagccuggcaaaacaggucgcggagaaagguauucgggugaauauugucgc

SEQ ID NO: 53781 - RNA, 64 nt, Escherichia coli CFT073
gcgcguaucagcccgugggccagggaugaacuggcgaucaaaccuggccuguggcuguaugcgc

SEQ ID NO: 53782 - RNA, 110 nt, Escherichia coli CFT073
gcgcuguauuuauugcauuuggauauuaaauaugaaaaguuaugaugauuaucaacaugauucuucuuaugguuuuauaugggauaagguaaaugccagauuuauggcgu

SEQ ID NO: 53783 - RNA, 82 nt, Escherichia coli CFT073
gcgccacugagcacgcuauuaaacuggcccagcaagagggucucgguuuuguuagcguuaaaaacacgucucacuguggugc

SEQ ID NO: 53784 - RNA, 61 nt, Escherichia coli CFT073
gcgauuggcgcucacccgaguuuucccgacagggaaaauuuuggucgcagcgccaugcagc

SEQ ID NO: 53785 - RNA, 63 nt, Escherichia coli CFT073
gcgauuuaucuugccgaaugcgcuguuaacgccucauccgcguuggcaugguaagcgaagcgc

SEQ ID NO: 53786 - RNA, 105 nt, Escherichia coli CFT073
gcgcaccgcccggguucagcccuugauaaauuuuauccaguaacgccuggcgcucggaagguuccaggaauugcaggguaaaauucagcaccaccaucgaugcgu

SEQ ID NO: 53787 - RNA, 66 nt, Escherichia coli CFT073
gccuguaauuaaaaccuggcucauauugccuccccccgguauguguacucauguuuaacuauaggu

SEQ ID NO: 53788 - RNA, 77 nt, Escherichia coli CFT073
gccugugaaagccugcgcgcuggcgaauccgauauggcgguugccggcggcguggcgcucucuuucccccagcaggc

SEQ ID NO: 53789 - RNA, 102 nt, Escherichia coli CFT073
gccuucaugagcaaugaaacuuucaucccccgugguccgccaguauugaauaaccgcccaggcgauaucggccaccagaugauguuccgccugcgcagaggc

SEQ ID NO: 53790 - RNA, 66 nt, Escherichia coli CFT073
gcgaaaaguaaaagugcgcaguuauggcaucaguuuaaucuggcucgucagcagccuuuuacucgc

SEQ ID NO: 53791 - RNA, 78 nt, Escherichia coli CFT073
gcgaaaauugugauuauggaugaaccgacuucuucguuaaccgaaaaagaggucaaucaucuguucacuauuauucgu

SEQ ID NO: 53792 - RNA, 103 nt, Escherichia coli CFT073
gcgaaggccgcugcgaauaauguuuucaauuucauauucauguuaagcgagauuuugugccuggcaggccauuggguugagaauauuagaguauuggaagcgc

SEQ ID NO: 53793 - RNA, 64 nt, Escherichia coli CFT073
gcgauagcagcgugcuugucccugucucuugugggaacagggcuugcuaaugcugaugauucgc

SEQ ID NO: 53794 - RNA, 111 nt, Escherichia coli CFT073
uaaagcucaaaagaugcgaauauuggauggcggcacaaaagcagaugaaacggguugugccgcuucuucugguuauuaugccugcauguucaaucgcgggaaugcgcuuua

SEQ ID NO: 53795 - RNA, 62 nt, Escherichia coli CFT073
uaaucacaguagucgaaguuuuuuagccgcuuaacuuacugaaauuuaacuacugaugauug

SEQ ID NO: 53796 - RNA, 76 nt, Escherichia coli CFT073
uacuacuacaacaccgacaauuuuuccuuuaucuuuuauacuuguagagaggaagaaucccgguguauucguagug

SEQ ID NO: 53797 - RNA, 56 nt, Escherichia coli CFT073
guuggugcguuuguugaggaugucaugcacauccuucggcaauuccacgcuccagc

SEQ ID NO: 53798 - RNA, 110 nt, Escherichia coli CFT073
guuucucgcuuuggugaugaaggugaauaccgcgugccugcggcaaaaaugcuggcgauggugcugcauggcaugcagggaacgccguauaucuaccagggcgaagagau

SEQ ID NO: 53799 - RNA, 62 nt, Escherichia coli CFT073
guuuccauauugucuuccagaucagcggcaaacgacgccgaacugaauaccaaugaggagac

SEQ ID NO: 53800 - RNA, 60 nt, Escherichia coli CFT073
guuuuccuuauuguggcaauuggccuuguuggucugaucaugcugcagcaagguaaaggc

SEQ ID NO: 53801 - RNA, 68 nt, Escherichia coli CFT073
uagcaugugauucaauguaagcccgggccgucuguuccaguacaccaggcucagcguuguauguguua

SEQ ID NO: 53802 - RNA, 64 nt, Escherichia coli CFT073
uagcggacgucgacuacuggaaacuucgcuaaaacccuguggcaaccagguuggcguccagcug

SEQ ID NO: 53803 - RNA, 68 nt, Escherichia coli CFT073
uacuguguauucguaagcaucauuucugcgcagucuggcagauccugaaauccuuaugaaacaaagua

SEQ ID NO: 53804 - RNA, 67 nt, Escherichia coli CFT073
uagggcugguggaggcgggacuggggauuucggcgcuuccuggucuggcaaugccccaugcgcccua

SEQ ID NO: 53805 - RNA, 90 nt, Escherichia coli CFT073
ucacauaguauuugcgccaaaauaccgaagacagguguucuacagagagaagcguagagcaauaggcuguauuuugagaaagcuguguga

SEQ ID NO: 53806 - RNA, 100 nt, Escherichia coli CFT073
ucacccacaguuguuuucaguuccuuauaauauucaaugaauugccuuuguuucucuucacugaauuuaugggggacgccugacgguuuuuuguagguga

SEQ ID NO: 53807 - RNA, 61 nt, Escherichia coli CFT073
ucaaacucccuuuacuuaccuuugcgugccaauuuaaguggaguaagugaagggaguguga

SEQ ID NO: 53808 - RNA, 56 nt, Escherichia coli CFT073
uaugcauaaaaagcagcggcugacgucuuccgacguuggccguuuuuuuaugugua

SEQ ID NO: 53809 - RNA, 67 nt, Escherichia coli CFT073
uaugugaagagcguucaagcgccguuacugaaaaauauucugcaaagcggcgaacguaucgugcgug

SEQ ID NO: 53810 - RNA, 58 nt, Escherichia coli CFT073
uauucccauaaacucagaucuauugaugugccacuuaggaucugaguuuuugggaaug

SEQ ID NO: 53811 - RNA, 84 nt, Escherichia coli CFT073
uauucgcuuaaucuauuaauuugcuggaaauauuuaagggaugaaugccuugaauaaaccaucaugauuuuuagacaguggaug

SEQ ID NO: 53812 - RNA, 62 nt, Escherichia coli CFT073
uauugccaugagcuauuaagaugucauuccuauaaaaaggagaacaauagccaugugcaaua

SEQ ID NO: 53813 - RNA, 130 nt, Escherichia coli CFT073
uauuucgcgauacugauugccgcuuucggcuuauuuuugguguugcagccguggcaacucgauuucucuucgaugaaaagugccaugcuggcaauccucuccggugugaguuggggggcgagcgcgauug

SEQ ID NO: 53814 - RNA, 85 nt, Escherichia coli CFT073
uauuuguacgaugucgguccuuaucugauuuccagugaugaauguauucagguaaaggaguucgagaaaaauuauugugcagaua

SEQ ID NO: 53815 - RNA, 82 nt, Escherichia coli CFT073
ucuaaaguaaauugccguuguagugccuugucuuugcugauaugcaauucauugcuacuuaacagcccguuaacuuuguaga

SEQ ID NO: 53816 - RNA, 85 nt, Escherichia coli CFT073
ucgucgauugagacaugaagcagguauggcccaucacuguucagcauggugucgagugccgcuucaaccuggucuuuauggguga

SEQ ID NO: 53817 - RNA, 56 nt, Escherichia coli CFT073
ucgcgaguccguuccuguaagguagcuauaugauuuuuauagagcgaggccaguga

SEQ ID NO: 53818 - RNA, 88 nt, Escherichia coli CFT073
ucgcggcaccgauuaugggcaaaaauggcccggaagagauugaugccacggcagaagauuacgagcgcguuauugccuggugccauga

SEQ ID NO: 53819 - RNA, 61 nt, Escherichia coli CFT073
ucgcugauggcgcagguagcgccucgcagggaggcgaaggugcgaugcucgccgucaauga

SEQ ID NO: 53820 - RNA, 84 nt, Escherichia coli CFT073
ucggcaacuugcugcucggcgugccguuugcuuucacaccgcaauuacgcguggaauaucucggcagcuucuggcaacugcuga

SEQ ID NO: 53821 - RNA, 60 nt, Escherichia coli CFT073
ucgaugggcguuaucuuuaucacucacgauaugggcgugguggcagagauugccgaucgg

SEQ ID NO: 53822 - RNA, 61 nt, Escherichia coli CFT073
uccuccuuucagagugcuccgcuucucacuauuaucucacgcaguauucuuaagggaagga

SEQ ID NO: 53823 - RNA, 60 nt, Escherichia coli CFT073
uccagaauucagguugcauccgucugaauggaaugaagauggaaggaucuggauucugga

SEQ ID NO: 53824 - RNA, 68 nt, Escherichia coli CFT073
ucagccacugaccgcugagcaaaaccguauucuggaagcacagcuacgcacucagcgugaguugcuga

SEQ ID NO: 53825 - RNA, 56 nt, Escherichia coli CFT073
ucagaauauccggugaagugauuaauauuucguugaauauuucuccggauuuuuga

SEQ ID NO: 53826 - RNA, 56 nt, Escherichia coli CFT073
ucaggaugccgaaguggaugaugcgaaauacggcuucgucgccuccggcauguuga

SEQ ID NO: 53827 - RNA, 85 nt, Escherichia coli CFT073
ucaggcaguuagcgggcugcggguugcaguccuuaccgguagauggaaauauuucuggagaguaauacccagucuguuucucuga

SEQ ID NO: 53828 - RNA, 55 nt, Escherichia coli CFT073
ucaggucacgcucuggaacagcgucccggcgcuguucgauaugcugcugaccugg

SEQ ID NO: 53829 - RNA, 56 nt, Escherichia coli CFT073
ucaguugggcugcgaaguuuucggucugcaagguccggauaucgacgccgaacuga

SEQ ID NO: 53830 - RNA, 58 nt, Escherichia coli CFT073
ucaguuuuucuccugaucaugaacgaauuaaccauuugaugaaucagagaaaaaguga

SEQ ID NO: 53831 - RNA, 68 nt, Escherichia coli CFT073
ucaucauucuggcgguaaggcggugcuagcccauccugggcgguacaaucuuagugcuaaauggcuga

SEQ ID NO: 53832 - RNA, 88 nt, Escherichia coli CFT073
ucauggauggcgaacuauguggugaaagguuuuggucucgauggcuugccaucauuagccaucuucgcgauucucgccgcuuucuuga

SEQ ID NO: 53833 - RNA, 73 nt, Escherichia coli CFT073
ugaaaaaaaucuccuugacaauuuauuucuggcucaugaagcuggacaugaaaaagcaugggggcuuuuuuua

SEQ ID NO: 53834 - RNA, 67 nt, Escherichia coli CFT073
ugaaaaacggcugcggaauuagaccaguuaucucccgaagaaggaaauuuccgcagcgcguguuuua

SEQ ID NO: 53835 - RNA, 75 nt, Escherichia coli CFT073
ucugauuccggguccaggagcaucauuacgcgcuggcgcugguaaucaugcaucaggaagaaccacagaaucgga

SEQ ID NO: 53836 - RNA, 62 nt, Escherichia coli CFT073
ucuggcggcacucucugucccuuuuucugccgcauuacgucagggauuagagaccugucaga

SEQ ID NO: 53837 - RNA, 58 nt, Escherichia coli CFT073
ucuuacggucgauuucaacagaggcuuuuuucaggccauugaugaauuugcuguaaga

SEQ ID NO: 53838 - RNA, 79 nt, Escherichia coli CFT073
ugauaugccauugaaauuaagaaagccgugcaggcaaguuuuccauuugccaucuacgcuuaauuuugaagguguauca

SEQ ID NO: 53839 - RNA, 90 nt, Escherichia coli CFT073
ugaucgcggaagauuuuacuggcgaugaaguacacggcacuuuucccccagccggugcgcuguacaaccaguaguuuucgccgcugauua

SEQ ID NO: 53840 - RNA, 83 nt, Escherichia coli CFT073
ugaugccaaagaauuagcugacccagcguuuaaugcgcaaaaacaggcgcugaaauggggucuggcugguuuuuccagcacca

SEQ ID NO: 53841 - RNA, 84 nt, Escherichia coli CFT073
uggcaaucgggggaacugggaggccaguggcaagaaaguaaaucacuuuuuuaccacuggccuucugcuuucagacgcuuguua

SEQ ID NO: 53842 - RNA, 65 nt, Escherichia coli CFT073
uggcaacgcugcgguuuugugcuggugcgaauggguaaucaucgugaagccagcagcgguugcua

SEQ ID NO: 53843 - RNA, 87 nt, Escherichia coli CFT073
uggaucgcuugacuccaggcaaacgccaguaaaaauccgcgcuaugaagcaguuuuuacuggcauuugccugaaaagauucgauuca

SEQ ID NO: 53844 - RNA, 69 nt, Escherichia coli CFT073
ugcgcugcuaucuggugagagugucgguaucgugagaacaccgccgcuccguuaucgggugguuucgca

SEQ ID NO: 53845 - RNA, 71 nt, Escherichia coli CFT073
ugcugauguguucugggaucugcaggacacggcaacagaugcaggucugcuuaaccagaacgacguuacca

SEQ ID NO: 53846 - RNA, 75 nt, Escherichia coli CFT073
ugcugccgcaaaacugaugcagaaugcagaaaaugucagcgaauaucugucauuacgccaucaggggcugcagca

SEQ ID NO: 53847 - RNA, 56 nt, Escherichia coli CFT073
ugccuggaacgacgauaacugaguagaccaucgccagaaacguuguuaacccggca

SEQ ID NO: 53848 - RNA, 70 nt, Escherichia coli CFT073
ugcccuugcucauauagauaauuuacugcaucaaaugcggcggucagauugucuauaugaacuguaggua

SEQ ID NO: 53849 - RNA, 72 nt, Escherichia coli CFT073
ugccguagacuucggacauuuucgccaccaccgguuugaaggugcuggucaggaugccggacccugccugca

SEQ ID NO: 53850 - RNA, 84 nt, Escherichia coli CFT073
ugccguccuccaguugcaguuugucggucaucaacauacgcacuucguacgcgaggacuuuauuaaacugcuggaggcucggca

SEQ ID NO: 53851 - RNA, 58 nt, Escherichia coli CFT073
ugcaacaucugucaguacuucuggugcuucuauuuuagaggcagcugucaggugugcg

SEQ ID NO: 53852 - RNA, 61 nt, Escherichia coli CFT073
ugcagauccuucacuuaauuucauucaguuagauccugaaauaauguuguaugagggagca

SEQ ID NO: 53853 - RNA, 57 nt, Escherichia coli CFT073
ugcagcaugucaucugcauuuucugcaggcacaccugaaaaugucaaugacacugua

SEQ ID NO: 53854 - RNA, 58 nt, Escherichia coli CFT073
ugccaggcccaacccuuucauauuaaugaagguggcaaaauuugggacaaaaauggca

SEQ ID NO: 53855 - RNA, 72 nt, Escherichia coli CFT073
ugucugccgcucacguucgugccugcuaccaacuggugaaagagcaugaucgcgugggccgaauggcggaca

SEQ ID NO: 53856 - RNA, 130 nt, Escherichia coli CFT073
ugugucgaauuagaagggcagaguggaaccaccguggccuuuuccgguauagcggcagcagaaccguugcgauuuaucugggaagugccuggcggugggcgguuaauuccgccgcuaaagauucaacgga

SEQ ID NO: 53857 - RNA, 78 nt, Escherichia coli CFT073
uguggcuaaaagcaggcacauaacagcuaaguauuuucaaccagagagaauccuuagcguuguggugaaugcggcuca

SEQ ID NO: 53858 - RNA, 78 nt, Escherichia coli CFT073
uguucauuguaaauuuccucuuugcuaacgcaaaucauuaucauuacgccuuuggcaaagggaaauuuaugaagaaca

SEQ ID NO: 53859 - RNA, 60 nt, Escherichia coli CFT073
uggcgaaucagcgauuuuugcugacuuaaugaacgugcaguaucaauagugauaucgcca

SEQ ID NO: 53860 - RNA, 60 nt, Escherichia coli CFT073
uggcgaucgccacgaucucuccacucaagccuaucaggguggaggacgagguauugacca

SEQ ID NO: 53861 - RNA, 74 nt, Escherichia coli CFT073
uguuuguaccaccgaaaagugauauuacggucucgucgccagugacguuggcuggugaaauuacuuaucaaaca

SEQ ID NO: 53862 - RNA, 84 nt, Escherichia coli CFT073
uuauucuccaguguuauauacuauagggggguaugcauugacauauagcauaccccccuauaguauauugcaugcagaugauga

SEQ ID NO: 53863 - RNA, 66 nt, Escherichia coli CFT073
uuccggcauccgcgauaauaauggacggcaccaugccggugccaucacgucgauuaucgccugggg

SEQ ID NO: 53864 - RNA, 65 nt, Escherichia coli CFT073
uucgagaagugggcucgccaggaaggaauugaauguuaccgccuguaugacgccgaucugccgga

SEQ ID NO: 53865 - RNA, 101 nt, Escherichia coli CFT073
uucgguuucaacaguaaaauggcgcaauuuagcggguuggcgacggggcugcgguggcugccagcuacuuugugucaguacuugcuccagaccaaaccgaa

SEQ ID NO: 53866 - RNA, 63 nt, Escherichia coli CFT073
uucugccugggaagauguaagccgccagcuuuuuguuggcguacucuuuuuccagcgccagga

SEQ ID NO: 53867 - RNA, 74 nt, Escherichia coli CFT073
uucuucgagacaccuucccgaaauuuugcaacguccugcaacggcguaaauaguccggaagaugcgccgaagaa

SEQ ID NO: 53868 - RNA, 108 nt, Escherichia coli CFT073
gguuuugaauaaacgcuuuacuauucucaugaaaacaguguuauguuguuauuuuaacaaccccgcauuguuuuuugaugggauggguauuaagacuuuagagaaacu

SEQ ID NO: 53869 - RNA, 62 nt, Escherichia coli CFT073
guaaaucgcuacauguuaacacacaacguaaauguugugguguaagcacaguaguagaggac

SEQ ID NO: 53870 - RNA, 57 nt, Escherichia coli CFT073
guaaugcuuugaauuucaguuucugggcgaugccguuaagcugcaucagggcgauau

SEQ ID NO: 53871 - RNA, 61 nt, Escherichia coli CFT073
guauugccggcuucgagaaaguggauaugacuguugguagcgaucugaaagcugacaaugc

SEQ ID NO: 53872 - RNA, 65 nt, Escherichia coli CFT073
guauuuccguacgucauaacccagaguucaccaugauggaacucuauauggcuuacgcagauuac

SEQ ID NO: 53873 - RNA, 87 nt, Escherichia coli CFT073
guauuuccugaaagaaaaaguggcggagaucccggaacugcaugcgguuucugaauucauccacuuugccuguacuucggaagauau

SEQ ID NO: 53874 - RNA, 59 nt, Escherichia coli CFT073
gucaggaaauugugucagcgaauugccgagaaauaugcgcaaugcugcgauaucgugac

SEQ ID NO: 53875 - RNA, 65 nt, Escherichia coli CFT073
gucacuaauuagccaucgauaaaaaugguugaguaaccauuuuuggauggucucauuauccuggc

SEQ ID NO: 53876 - RNA, 80 nt, Escherichia coli CFT073
gucgaauuuggcguuagcccggcaggcguguggcguaaccgaucacacgauccgcucgguuccgauacccgaggcgcggc

SEQ ID NO: 53877 - RNA, 63 nt, Escherichia coli CFT073
gguguuuuucagaaagaaugugaugaagugaaaaauuugcaucacaaaccugaaaagaaaucc

SEQ ID NO: 53878 - RNA, 61 nt, Escherichia coli CFT073
gguucacuggugguuuuacuggcgcucuacccguggguggaagugaaauccaacaguagcc

SEQ ID NO: 53879 - RNA, 60 nt, Escherichia coli CFT073
gguucuccggucaccaccgucgacaccgccaagucgggcaaucuggugaacuggaaagcc

SEQ ID NO: 53880 - RNA, 97 nt, Escherichia coli CFT073
ggugaaugcugaauuaaaacgcagaauuuuguccgauagugguaucgguguaccauucgcgcagacgaaaauucuuaaccuuaaucuggaauacgcc

SEQ ID NO: 53881 - RNA, 63 nt, Escherichia coli CFT073
ggugagaaugugguggccaucaccaguucauuucguugagcccugacggccccgacauccauc

SEQ ID NO: 53882 - RNA, 90 nt, Escherichia coli CFT073
ggucuggcgcagcguauuaucaacggcgaagugcccgaaggguugaaaggccgccgcguacuggcgcuggauaugggcgcgcugguggcu

SEQ ID NO: 53883 - RNA, 64 nt, Escherichia coli CFT073
guuccuguuuauaaaaggagagguggaaggauuauagccaucgaugccuugucaggauaggaau

SEQ ID NO: 53884 - RNA, 63 nt, Escherichia coli CFT073
guucuucugccgggagcacaucgguuuuccacgcaucgaagacaauauccugggaggcagagc

SEQ ID NO: 53885 - RNA, 61 nt, Escherichia coli CFT073
guugauggcgcaaaaccgaacgccgcaagcagaugcuuuuuuucuggauuuugccaucaau

SEQ ID NO: 53886 - RNA, 74 nt, Escherichia coli CFT073
guguuucuucaaucugacgcaucaggccaugaauacccgcagccauccccugauggaucagacugagauccggc

SEQ ID NO: 53887 - RNA, 72 nt, Escherichia coli CFT073
guuaaccaaugaaaaugaucaggugguuuggaaagccucauauguuaccauaaugauuuucaugugguuaac

SEQ ID NO: 53888 - RNA, 56 nt, Escherichia coli CFT073
guggauugcacagguuaauacagagaaaaacauucucaguuugcuucugcauccac

SEQ ID NO: 53889 - RNA, 65 nt, Escherichia coli CFT073
guggcucagccacugacgccaggcaucgaccugcugccaggaggcuucgcgaucguggcugccgc

SEQ ID NO: 53890 - RNA, 79 nt, Escherichia coli CFT073
guggcuuugguaaucgggucaccaaauaugaacaacguuuuuguaauucagaauuuggcgaucugaaacugagcgccgc

SEQ ID NO: 53891 - RNA, 87 nt, Escherichia coli CFT073
guguaagguuuacagcgauuuagaccucuaucucgguguucaggcgaucaacuggacagagauguuuaauccuggcgcgaccuucgc

SEQ ID NO: 53892 - RNA, 90 nt, Escherichia coli CFT073
gugcgauaaaguccuaugccaucaauacggcugcccaguuuuucuucauguuccgggcuuaaaccggcauugagcauaacuuuaaugcgc

SEQ ID NO: 53893 - RNA, 90 nt, Escherichia coli CFT073
gugcuugccgaagagaugucauuacugaugcuggacagccgccgggugauccaaagcauucaguugaugaaaucgcugggcggcggguau

SEQ ID NO: 53894 - RNA, 78 nt, Escherichia coli CFT073
gucuuuuuuggcgauagugauguggaacgagucgaucucucuuaucacgagaguuuacaacgcauuguuaaaggcgau

SEQ ID NO: 53895 - RNA, 87 nt, Escherichia coli CFT073
gugaccgaacugcugaaacagaaacaguaugcgccgauguccguagcgcaacagucucugguucuguucgcagcagaacgugguuac

SEQ ID NO: 53896 - RNA, 68 nt, Escherichia coli CFT073
gugaugaccgguuuccgcguagcgcuagcuggcgcacaggauuauuacgguguggaaccggaucucac

SEQ ID NO: 53897 - RNA, 70 nt, Escherichia coli CFT073
gugauggcaauugccgguucgcuggugaguaaaaagagccaacccgccagcuccggcacauugccaacgc

SEQ ID NO: 53898 - RNA, 60 nt, Escherichia coli CFT073
gucguuuuaaauaucacccuguuugccagcgacuauuuuacuggcgaugguauuaacgac

SEQ ID NO: 53899 - RNA, 99 nt, Escherichia coli CFT073
gggcgggcaacggcaucuggaucgcccgguuuuugauucaaugaaagaagcgaugcgacaaacugaggcugaugccagcgugauuuaugugccugcacc

SEQ ID NO: 53900 - RNA, 66 nt, Escherichia coli CFT073
gggcgggcagcauguuaacaggcgguacuuucugguuugucaccggacuguuuauucuguuugccc

SEQ ID NO: 53901 - RNA, 92 nt, Escherichia coli CFT073
gggcugguguuugguaucguugggcugguguugcuacugguucaggcgguggaucucaaugccagcgccacggcgauaaccaguuacagccu

SEQ ID NO: 53902 - RNA, 71 nt, Escherichia coli CFT073
ggguaagcagggcgcgaaugacagcagugcaacauugccacaguucugccaugucgcgcucugcccagccu

SEQ ID NO: 53903 - RNA, 71 nt, Escherichia coli CFT073
ggguuauagagcagguuguugaugacgauauucaccuggcguuccacgccaucauucaccuguuguaacuc

SEQ ID NO: 53904 - RNA, 61 nt, Escherichia coli CFT073
gguauucgcuuugcuuuuacgaucaugaacagcauagagaauaaagggcagggcaaguacc

SEQ ID NO: 53905 - RNA, 58 nt, Escherichia coli CFT073
ggucaguaugugcggcgaaauggcuggagauauccagcaaacagcacgacugcucacc

SEQ ID NO: 53906 - RNA, 81 nt, Escherichia coli CFT073
ggcgggaguuucacguaaaucgacgcgacuggcugaguacgcccgcgccaagucgagcaacguuuuacgacagcacuugcc

SEQ ID NO: 53907 - RNA, 110 nt, Escherichia coli CFT073
ggcucaucacccacaguuguuuucaguuccuuauaguauucaaugaauugccuuuguuucucuucacugaauuuaugggggacgccugacgguuuuuuguaggugacacc

SEQ ID NO: 53908 - RNA, 92 nt, Escherichia coli CFT073
ggcugacagcuacagcaagaaugucaucacccgcguuaucggcgaacagcagaugaaagagcuggggaugcauuccuaucuggcggucgguc

SEQ ID NO: 53909 - RNA, 82 nt, Escherichia coli CFT073
ggcuggagcuggcgguaaucuccagcagcgaugaaacaaaaguaaaagcugacuggccaacgguuacgguugucucugagcc

SEQ ID NO: 53910 - RNA, 97 nt, Escherichia coli CFT073
gggauggcgcgcgcauugagcaguuugaucgcaaagguauggugaacaacaaguucaacuacuucauuaugagcaaacuggcugaagcggguauccc

SEQ ID NO: 53911 - RNA, 84 nt, Escherichia coli CFT073
ggcgcguaugcgcacauucgucggcaguucaaaaucucuaucgguaagauggaagggauugaagagccgcuggcgcguauugcc

SEQ ID NO: 53912 - RNA, 85 nt, Escherichia coli CFT073
ggcgcaacacgcgcgauuccgguaggcggucguuauaccuuccgggauauggggauguuaagcuggaguugcguuguugccagcc

SEQ ID NO: 53913 - RNA, 129 nt, Escherichia coli CFT073
ggcgcaacccgucgcuuacguuauucacggggaaaaccacgcagagcuggcccgacagauggcgcacaaacacgccugcuugcgucauguucuggucgcuggagagaccgugagcgacgauuuuacgcc

SEQ ID NO: 53914 - RNA, 75 nt, Escherichia coli CFT073
ggccugagaaacuuugucgcguggacccaguuccauauauuuguuuuucggcucgcccagcggaguuuccgggcc

SEQ ID NO: 53915 - RNA, 55 nt, Escherichia coli CFT073
ggcgacauugaaaauaaauauccuccggcauagccggagguuuuucaaaugcgcc

SEQ ID NO: 53916 - RNA, 91 nt, Escherichia coli CFT073
ggccggaaccuucuaugauuaugaggcgaaguaucucucugaugagacacaguauuucugccccgcaggucuggaagcguuacaagaggcc

SEQ ID NO: 53917 - RNA, 85 nt, Escherichia coli CFT073
ggccauucugggauacugguugcucauugcaggcguaacuuuacgcauucuaaugaaacgacgcgcaguucccuccgcgauggcc

SEQ ID NO: 53918 - RNA, 119 nt, Escherichia coli CFT073
ggcccaucuuguacucaaaugcuggccugguuuggcgcugacgucauuaaaauugaacgucccagcguuggugacguaacgcgccaccagcugcgagauauuccugauaucgaugcgcu

SEQ ID NO: 53919 - RNA, 72 nt, Escherichia coli CFT073
ggcaaaagaguugcaguuaagugcgguuucgauggguuacaucuucucugcuuuuggcugggccuacuugcu

SEQ ID NO: 53920 - RNA, 128 nt, Escherichia coli CFT073
ggauauccucauugcguggcugcaggacaauaucgacugcgaaucgggaauuaucuuugacaacgaugaggauaaaacggauucggcagcacuguugcccuguaucgaacaggcccgggaggaugucc

SEQ ID NO: 53921 - RNA, 75 nt, Escherichia coli CFT073
ggagcagaacagguuacggucgccguaaacaucauccagacguuucacggucggccaguauuugucugccacacc

SEQ ID NO: 53922 - RNA, 67 nt, Escherichia coli CFT073
ggaguggcugggauguauggauauguugucuggcggcaauuuugcugauggauccuguugccauucu

SEQ ID NO: 53923 - RNA, 85 nt, Escherichia coli CFT073
ggaguucuuuaaucugcuucauggcagcagcaaguucagaggcaggaacgaccuguucuccugcggccacagcaguaagacuucc

SEQ ID NO: 53924 - RNA, 119 nt, Escherichia coli CFT073
ggaguuuaaugaugucgcuuacuggccgcagaucaaacaggugcuggaguggucgaaagaucacgucaccucgacgcuguuugucugcugggcuguacaggccgcgcucaauauccucu

SEQ ID NO: 53925 - RNA, 67 nt, Escherichia coli CFT073
uugaugccgucuaacucguucauaggaaauacuccuugaaaaguaaaguguuagaugagugcguuaa

SEQ ID NO: 53926 - RNA, 67 nt, Escherichia coli CFT073
uugccgagaucagguuauucggcacagacugguaguucgccaguaacugcuugguaucuuucggcag

SEQ ID NO: 53927 - RNA, 64 nt, Escherichia coli CFT073
uuggcgggacuuacccauuucccuugccugcuuugggaugaggcugccgggaaaguuuugccga

SEQ ID NO: 53928 - RNA, 73 nt, Escherichia coli CFT073
uugcaucaauagcauucgcuuuuggacgaucaaggguaauuuccagaauugauccauugcgggucagauguaa

SEQ ID NO: 53929 - RNA, 61 nt, Escherichia coli CFT073
uugucuuugcuaucagucucaagggccgcgaaagcggcccuuuuuuacuuaguagagauaa

SEQ ID NO: 53930 - RNA, 75 nt, Escherichia coli CFT073
uuucauaagguuauuggcaauauaacguucaauucuuacuugcauuuuauauuagccaggaacuuugcccugagg

SEQ ID NO: 53931 - RNA, 89 nt, Escherichia coli CFT073
uuguuuagauuucguuuaaguuaaucgaccauacuggagaucgucagaaaauauuuccaggagauggcaugauucgcuuaucugaacaa

SEQ ID NO: 53932 - RNA, 68 nt, Escherichia coli CFT073
uuucaaaauggugcggaauuuuacugcaauugcugcugcuuuguaaagcaccgcggccuuuuuugaaa

SEQ ID NO: 53933 - RNA, 65 nt, Escherichia coli CFT073
uuuugaucacaguauuaucaaugacccgaaucugauccucgggcagauuauucugcugaucagag

SEQ ID NO: 53934 - RNA, 94 nt, Escherichia coli CFT073
uuuuuuaacagguuagauaauugcaauggcagucacugaacaggcaucucuugccauaaaacugucaucaaucaucuugacaaauguuaaaaaa

SEQ ID NO: 53935 - RNA, 73 nt, Haemophilus influenzae Rd
uuugccaaaugaucggcuucuuuuucuucaaaaauccagaagaauuuuggcauuggucauuuaguauggcggg

SEQ ID NO: 53936 - RNA, 130 nt, Haemophilus influenzae Rd
uuuaaauacgcaggcauuuacucgggugcaggcgaugaaugaaggcgacagugcgaugcaaacaacccauauuuugcuugcggaaaacagucguuuauucuauuugccgcauccguugguguuacauaga

SEQ ID NO: 53937 - RNA, 57 nt, Haemophilus influenzae Rd
uugucuggaauuagacgaagaagacuuggcguuauguucuuucguuuguccaggcaa

SEQ ID NO: 53938 - RNA, 63 nt, Haemophilus influenzae Rd
ggcgaaauugugacugaucgccucaaugagucuuuuggugaauuaaugaauuacgauuucacc

SEQ ID NO: 53939 - RNA, 55 nt, Haemophilus influenzae Rd
ggcugauaaagaucuaauggcuuuugaugcgccugauuuagaacuuuaucaugcu

SEQ ID NO: 53940 - RNA, 73 nt, Haemophilus influenzae Rd
gguauacaauauuggcuaugaugcaccaagcaaaaaauggggcauggauguguauaucaccgauguugcagcc

SEQ ID NO: 53941 - RNA, 66 nt, Haemophilus influenzae Rd
gggugugggaugcucguuuaacugcagaauuaauuuuauucuuucuuuaucuugguaucuuagccc

SEQ ID NO: 53942 - RNA, 70 nt, Haemophilus influenzae Rd
ggggggagcugucgcgaagugacugagggggauacguaaucccccuuccgcccuucgggcaccuuccccc

SEQ ID NO: 53943 - RNA, 60 nt, Haemophilus influenzae Rd
guuaaaaaaagaggcgugauuauagcaauuuuuguuauaguuccaaccuuuuuaguuagc

SEQ ID NO: 53944 - RNA, 66 nt, Haemophilus influenzae Rd
guuaugcguuuugaaggagauauuuucgguaauaaaaaaccgauguauuccguucaagaacaaaac

SEQ ID NO: 53945 - RNA, 62 nt, Haemophilus influenzae Rd
guuauuuacguucuuuggguuacgauuuaacuuaugugcguaauauaacggacguagaugac

SEQ ID NO: 53946 - RNA, 79 nt, Haemophilus influenzae Rd
guucuuuaucaauuaaaacaucagguuuauuaggugagcaauauauugccuugacaauggguuuugaugauggagauac

SEQ ID NO: 53947 - RNA, 68 nt, Haemophilus influenzae Rd
guaggggcaaguuacauuugccccuauauaucaacgaauguucaagggcaaaugugauuugccccuac

SEQ ID NO: 53948 - RNA, 130 nt, Haemophilus influenzae Rd
guacuugugcugcuuuaguuucacgcacaaucgcauugauaauaaguuguuuuguuucacgaucugcaccagcaacuuuuacuuuaaugaguucgugaugauuaagugcauuuucaauuucagcaaguac

SEQ ID NO: 53949 - RNA, 88 nt, Haemophilus influenzae Rd
uucugauaagcaugccuuauuuauuccaacaguacauucugaugccugcacgggauguggaaaaugugagcaagcuuguguguuagaa

SEQ ID NO: 53950 - RNA, 101 nt, Haemophilus influenzae Rd
uucagcgaauugagucuuccuuaaaacaacagcuuucgccuuuaucugaaaaagauuacgucaaagaaguucgugcauuaggggcgauuggggugguugaa

SEQ ID NO: 53951 - RNA, 58 nt, Haemophilus influenzae Rd
uggcgcaaguauaacaaaaagugcggucauuuuuaaccgcacuuuuaacacuuaguca

SEQ ID NO: 53952 - RNA, 58 nt, Haemophilus influenzae Rd
ugcaauugcaacaguaauugguaugcguuuauauggcgaugccggcguggcgauugca

SEQ ID NO: 53953 - RNA, 80 nt, Haemophilus influenzae Rd
ugaugcgcgcgugcgugcgguuucacacuuccguacuuuagauucagcggaagcguuagcagcagcaaacaaacguguca

SEQ ID NO: 53954 - RNA, 55 nt, Haemophilus influenzae Rd
ugaauguugguagagaguuuccaaaauguccuuugcauuuucuaccaacauugca

SEQ ID NO: 53955 - RNA, 65 nt, Haemophilus influenzae Rd
ucagaauaugaacucgcgaacgaagagaaugaaaaaccgcaauuuucuuuuggguuugauucuga

SEQ ID NO: 53956 - RNA, 58 nt, Haemophilus influenzae Rd
ucaucuuuuacgaagugcaucguaaacauuaucauacgugcaacccagaagaagauga

SEQ ID NO: 53957 - RNA, 67 nt, Haemophilus influenzae Rd
ucccaauuuagcugccgugauuuugccucgcucgggucuuggccauaaacacggcauuguguuagga

SEQ ID NO: 53958 - RNA, 99 nt, Haemophilus influenzae Rd
uccuucugaguuuugguuagauugcucuauuuuuaauugugauaagccugucaggguuuauaaauaucaguauagcaaccaagaaccagagucgaagga

SEQ ID NO: 53959 - RNA, 86 nt, Haemophilus influenzae Rd
uccguuuuuaaacagacuuuuaaugcaauuagugauccuaaagagcagcugauuguauuggaagauuuuuucaauuuaauuuugga

SEQ ID NO: 53960 - RNA, 88 nt, Haemophilus influenzae Rd
ucaagaagaauuaaugcacgaccacgguuuguuggaucguuaggaacaacaacuuuagcaccgucuuguaauucauucacauuuuuga

SEQ ID NO: 53961 - RNA, 64 nt, Haemophilus influenzae Rd
ucaagcaucuugucaucccauuguuuaguauggauguuaaauaacaugguacgagaugcguugg

SEQ ID NO: 53962 - RNA, 83 nt, Haemophilus influenzae Rd
guuguaaaaagcaccauuuuaguucguucauuaauugaaagcgguaaauauuacguaacugaaaugcuuagcucacuugcaau

SEQ ID NO: 53963 - RNA, 77 nt, Haemophilus influenzae Rd
guuggacgcugggcuguaauaggauauauugaagauuucugguugauauucuuauugcaacuuaugcacaguuuaac

SEQ ID NO: 53964 - RNA, 76 nt, Haemophilus influenzae Rd
guuggaugauuguggaucuguguuugugauuuauuauuugcuuuuucaauggcauaacagaacccaguuaaacgau

SEQ ID NO: 53965 - RNA, 77 nt, Haemophilus influenzae Rd
uacgaaagcggugcuuaaugauuuacaaagcauacauuuuucaaaaaaugauguauuaguugguaucgcugcaagug

SEQ ID NO: 53966 - RNA, 65 nt, Haemophilus influenzae Rd
uacgaagaaugucguacuagaaaaaagcuacgacagcuauuuuaacggugaugacaaucaacgug

SEQ ID NO: 53967 - RNA, 87 nt, Haemophilus influenzae Rd
uaagugcgguaauuauuggcaucguuuuagguuggcugugcaaagauugguugcauuuuccaaaugguuccaaucuuuacgugcuua

SEQ ID NO: 53968 - RNA, 63 nt, Haemophilus influenzae Rd
gcgcauuacguuuuagcaagguaauuccuuacgcaggaaauauugugacaaaugauauugcgc

SEQ ID NO: 53969 - RNA, 83 nt, Haemophilus influenzae Rd
gcggauuucuuuaagaauuuuuuccgcaauuugugcuuuuugaccagugagagaaagugcgguaaaaaauucgaggguuucgc

SEQ ID NO: 53970 - RNA, 59 nt, Haemophilus influenzae Rd
gcguuauaucaauuggacaggcugcggcaauaugcucaauuuauccucugauguagggc

SEQ ID NO: 53971 - RNA, 76 nt, Haemophilus influenzae Rd
gcuuuaauaaagguggugcgaccguagaagauguugcauugaugaaaaacacggucggcaauauugguguuaaagc

SEQ ID NO: 53972 - RNA, 73 nt, Haemophilus influenzae Rd
gcauaauuggcaacuaggauuagcaagcauauugucgccuuguuuuaguguguuuuugauuugccaaaacagc

SEQ ID NO: 53973 - RNA, 97 nt, Haemophilus influenzae Rd
gaguuugauguugccacaaacaucacaucagaaagaucauaauccacuucuaaauagugaucguuaaaugugguguuuugcucgggaucuaauacuu

SEQ ID NO: 53974 - RNA, 107 nt, Haemophilus influenzae Rd
gcacuuuuacggucuuuauaggauggguuucugcccaccaaagauuucauuaaucggugggcuuaaagcccaccuacagauuacauuacuaagcgacguaaaucugc

SEQ ID NO: 53975 - RNA, 59 nt, Haemophilus influenzae Rd
cgguguuauuuugacuugggguguggcagugccauauuucacaaugucagaagauauug

SEQ ID NO: 53976 - RNA, 69 nt, Haemophilus influenzae Rd
cuaacaaaaaacccucuguuuaaguagcgaaaaacagagauuuucgcuagaaugaggcguuuaauuuag

SEQ ID NO: 53977 - RNA, 89 nt, Haemophilus influenzae Rd
cuccccaaguauuacuuauaugaucauagccuaaaccaaugauauaacggcugggcugaauggcaucaaauaaauaacugcuuacggag

SEQ ID NO: 53978 - RNA, 94 nt, Haemophilus influenzae Rd
cucuuguggucaauguauuguuaaagugaaaaaugguggcggagaaauucuuccaaccgaacuuucucacauuaacaaacgugaagcaaaagag

SEQ ID NO: 53979 - RNA, 55 nt, Haemophilus influenzae Rd
cuuggcgaauuagcucaaauguugaaagaaacauauuguggcucaauuggcuugg

SEQ ID NO: 53980 - RNA, 64 nt, Haemophilus influenzae Rd
cuugagagaaaguaucgggaauaauacgcuuaucgcgcuuuuuuuuccagugcuuuauauuaag

SEQ ID NO: 53981 - RNA, 58 nt, Haemophilus influenzae Rd
gaaaaugugcggugcaaaacauuugauuauauuuuucauuuugcgcuuguagauuuuu

SEQ ID NO: 53982 - RNA, 55 nt, Haemophilus influenzae Rd
gaaaauuguccaugucaaucuagccaucauuacgcagauuguuguggcaaauuuc

SEQ ID NO: 53983 - RNA, 101 nt, Haemophilus influenzae Rd
aacggauaucacauugccaucgcgucaucuuguuuuuaugccugaaaauagccacguaggcguuucacaacgcauugaaagcgaagaagaacgcgcccguu

SEQ ID NO: 53984 - RNA, 57 nt, Haemophilus influenzae Rd
aaacaaugccacugccauaacgaauuaauuuugccauuuguucuggcgugauuguuu

SEQ ID NO: 53985 - RNA, 79 nt, Haemophilus influenzae Rd
aaucguaaacguugguuacgcacagggaaauguucuuucuuaccggaagaacgagcgugguaucaacguuuguaugauu

SEQ ID NO: 53986 - RNA, 100 nt, Haemophilus influenzae Rd
aggguaguauugaagaugcuuaucaacuugcuaaagauuuaguuacagaugaugcgguaaauaaauugaagcaauugguuggcaauaaaaaugcaauucu

SEQ ID NO: 53987 - RNA, 81 nt, Haemophilus influenzae Rd
auaaaauuagccuacaaaauuaccgcacuuuaggugaaaccuucucacuuaccuugcgccguuuugcaggcguaauucugu

SEQ ID NO: 53988 - RNA, 126 nt, Haemophilus influenzae Rd
acgccgauaccacauuccauaccguuacgaacuucagauacgucgucuuugaaacggcgaagagauucuaauuccccuucaaauauaacgacguugucacguaauacacggauuggguuguuacgu

SEQ ID NO: 53989 - RNA, 69 nt, Haemophilus influenzae Rd
agcacuagaacaguuuuagaaugcuaauuugguuuaacaaaggcuguguuuuaauacuguguuaaugcu

SEQ ID NO: 53990 - RNA, 77 nt, Haemophilus influenzae Rd
auuuuuucagcaaguguugcaucuuuauccaauuuuuuaucaaauguuggaucgggcgcaauaaguuuuggaucaau

SEQ ID NO: 53991 - RNA, 65 nt, Haemophilus influenzae Rd
auuuaaaauggcaucggcuuguucaucgcuuaaauuaaagcgugccauaagcucugcuuuuggau

SEQ ID NO: 53992 - RNA, 78 nt, Haemophilus influenzae Rd
auggugcuucaauaccauuuacuaauaagcgauugccuacaaagugcgguugauuuuguuugaauaauuggagaccau

SEQ ID NO: 53993 - RNA, 100 nt, Haemophilus influenzae Rd
caggauugguuuuaugguauuucaucacgucuuacuuuuaguuaugccaaccgaguguauagagagaaagauuugauugguauacagcaaaaaaaucgug

SEQ ID NO: 53994 - RNA, 102 nt, Haemophilus influenzae Rd
cagugauaaugcuuguaccuucugccaccauauuuaauaaaguaaauugagccugcauaucaguugggaacccuggauguggugcaguacgaauauucacug

SEQ ID NO: 53995 - RNA, 97 nt, Homo sapiens
cagugaucucauaaagugcacugagaauaguugccaaaguuuuguuaagagcuuuuugggcagcuauugacuuuauauaauguuuauuagauuacug

SEQ ID NO: 53996 - RNA, 66 nt, Homo sapiens
cagugggcgcugagcugugaccucucucugcaggacugacagcuauucaucaguuggugcucgcug

SEQ ID NO: 53997 - RNA, 59 nt, Homo sapiens
caguguuuuuacaagcacucugggugauucugauaaauccagaaauuugagaaccacug

SEQ ID NO: 53998 - RNA, 58 nt, Homo sapiens
caguucuuaugcugguggcuuccaaaccucacuuugagaaauacugccuuaggagcug

SEQ ID NO: 53999 - RNA, 59 nt, Homo sapiens
caguugaaagacauggggaugaugugguagacuaaauuauugcucccaauuuuucacug

SEQ ID NO: 54000 - RNA, 57 nt, Homo sapiens
cauaaagauggaggaggccaggcaggguggauuaugccuguaauccagcacuuugug

SEQ ID NO: 54001 - RNA, 67 nt, Homo sapiens
cauaaaugaguagguguuuuauguuuauccuuucccaugggauucccauaaugcuacuuauuuuaug

SEQ ID NO: 54002 - RNA, 60 nt, Homo sapiens
cauaauguaugaggauagguuucuauuaggcuguauguuugagaaaguuuuccucuuaug

SEQ ID NO: 54003 - RNA, 123 nt, Homo sapiens
cauaccgugcaauauuaugcauaauaaauuuccaaauggauuucagcugaguauucaguauguuacugaauacuggcacugaagaccaugaaaugcacauaauagaacuguacuuuuggugug

SEQ ID NO: 54004 - RNA, 66 nt, Homo sapiens
cauagguagcauagcgggaauaucagugguacguuguuccucucuguauuauugcuauggccuaug

SEQ ID NO: 54005 - RNA, 92 nt, Homo sapiens
cagugagguugaauacacuuuguacuggcuuguuucagagaggaaacucuaaccucuuuggcauuagccuguauagaacucaccccuuacug

SEQ ID NO: 54006 - RNA, 83 nt, Homo sapiens
caguccuguuucaauguuaauuuccugauuuugauaacugauauuauugagauguaagauguuaauauuaauugagaaagcug

SEQ ID NO: 54007 - RNA, 58 nt, Homo sapiens
cagguucaagcaauucuacugccugagccuccucaguagcuggaauuacuugcaccug

SEQ ID NO: 54008 - RNA, 66 nt, Homo sapiens
caguaugucuuuugcuugcaaauagauugcucauugccaacugcuuccaagaaagagauagggcug

SEQ ID NO: 54009 - RNA, 64 nt, Homo sapiens
cagucaagguguaggaguaaagaagucaaauauuuaugugugauuuauagcuacaucuugacug

SEQ ID NO: 54010 - RNA, 69 nt, Homo sapiens
cagucacuucaugguuucuuggacaggcagauccuggccauguucauguaauuccauaagguaaggcug

SEQ ID NO: 54011 - RNA, 64 nt, Homo sapiens
caggugcauuggcugacaccuguaauccuagcacuuuaggaggccaaggugggcgaaucaccug

SEQ ID NO: 54012 - RNA, 67 nt, Homo sapiens
cagguggugccucagggacuuacaaaccagaagguuccaugccuuccccuuuaguggguauuauuug

SEQ ID NO: 54013 - RNA, 72 nt, Homo sapiens
caugauuaaagauguucucauuucauagguucuuauaucugaauuguaugagagugaaagcauuucugcaug

SEQ ID NO: 54014 - RNA, 63 nt, Homo sapiens
caugcaaauagcacaugugcaaauggcugugugugucuccauacacacacauguguauguaug

SEQ ID NO: 54015 - RNA, 120 nt, Homo sapiens
caugcaucucauuuguaccuuucuccuaucaaguguauggauuuucagauucuuaucuuuuagaaggaugagcugcucaaucuguggucugugauggaaggcagguagggugaguucaug

SEQ ID NO: 54016 - RNA, 128 nt, Homo sapiens
caucucuauaauaaaaaggaaaaagaggaauccccuuuguagguuucauaguuuauacugauauuucugaugucgucucagagaauuagucacaauuauaggaacucagaaggcauuccguggagaug

SEQ ID NO: 54017 - RNA, 67 nt, Homo sapiens
caugauccuucaaaugaagugggauaaggagauccgcccaacaucccaguuuuucugaauagucaug

SEQ ID NO: 54018 - RNA, 63 nt, Homo sapiens
cauggauuuuuuugaauggcaguuauccaaguauggucuaggggcccuucgggggagucuaug

SEQ ID NO: 54019 - RNA, 55 nt, Homo sapiens
caugacacuggcauguuucuuuagugaugauaaaggcgacaugaucaguggcaug

SEQ ID NO: 54020 - RNA, 60 nt, Homo sapiens
caucagaaugugcauuuuaacaaggaacccagguaauucaaaugcacauuacugcuggug

SEQ ID NO: 54021 - RNA, 85 nt, Homo sapiens
cauccagcuacacguucuuucaccaucaucacccuccaguauugagugugagguacgugucaagaaccacacagcuuuucggaug

SEQ ID NO: 54022 - RNA, 76 nt, Homo sapiens
caucccagagacagaaugauaaacuguugucagcagccgaggaagacagaccccaguuuacacugcuuugagggug

SEQ ID NO: 54023 - RNA, 61 nt, Homo sapiens
caucccuuucugauacuuucccugaaucccagucuggaaaggguaguaaaagaggcgggug

SEQ ID NO: 54024 - RNA, 77 nt, Homo sapiens
cauauauauagcaguauacguacuggguccaauacuucgggugaaaaugaggccuacuguguauaugcuaguauaug

SEQ ID NO: 54025 - RNA, 83 nt, Homo sapiens
cauaugugugccugugcaugacagcauacaaacgugcauaguguguauguguguaugcaugugugcaugagugugcacaugug

SEQ ID NO: 54026 - RNA, 62 nt, Homo sapiens
cauauuggaugugggauaguguacaucaaugaaaaugaacuaauguugcacauaucaauaug

SEQ ID NO: 54027 - RNA, 77 nt, Homo sapiens
caucacauauucucacuuauuucuggguuccaaaaaucacaauaauuuaacucauggagauagagaauagaagggug

SEQ ID NO: 54028 - RNA, 81 nt, Homo sapiens
caggauuuugcuaugucagccaggcuggucuugaacuccugaccucaggcgaucugccugccuuggcgucucaaagugcug

SEQ ID NO: 54029 - RNA, 79 nt, Homo sapiens
caggcaaucuuccuaaauuucuuccucugugagauaguauaucauuucacugaggucugagcuuuaugaauggguccug

SEQ ID NO: 54030 - RNA, 81 nt, Homo sapiens
caggagaucagaguuagaauuguacugcaaucaggggaauauuuugccuugacuacgguucaguuaaaaguucauuuccug

SEQ ID NO: 54031 - RNA, 55 nt, Homo sapiens
caggaggcggagguugcagugagcugagaucgcgccauugcacuccagccugcug

SEQ ID NO: 54032 - RNA, 55 nt, Homo sapiens
caggaguucucucauuuauagauuauuacagcucugugagguagaggguuaccug

SEQ ID NO: 54033 - RNA, 63 nt, Homo sapiens
cagcuggaaagagguuuuuuuggguaaaaucccuagaaacauucucuugccuccuuccagcug

SEQ ID NO: 54034 - RNA, 79 nt, Homo sapiens
cagcugucaacaccucugggccucugguccauucucccuguuaagaaagagaaaauggcaagagccacagaggcggcug

SEQ ID NO: 54035 - RNA, 122 nt, Homo sapiens
caggaagaauaaauggauggggaacagauuaacugguaaauaguucucuuuggaauuugaauacauuugagagacagacauuaucuuauauaagagucuguucuugugugguuaaauucuug

SEQ ID NO: 54036 - RNA, 60 nt, Homo sapiens
caggaaugugaggguucccugccugaaaaguuaguaaggcagaggagaucucauguccug

SEQ ID NO: 54037 - RNA, 76 nt, Homo sapiens
caggacaguggggguggguuucuguugcuuuaagcccccgaguuugcuacagcagcccaguccccgaaccuuccug

SEQ ID NO: 54038 - RNA, 61 nt, Homo sapiens
caggacgcauacacguuaggcgaagucauccuuggugguguuucuauggugaugaguccug

SEQ ID NO: 54039 - RNA, 91 nt, Homo sapiens
caggguuuugcucuguugccuaggcuggagugcaguggcgugaucucugcucacugcagccucugccucucagguucaagcaauucuccug

SEQ ID NO: 54040 - RNA, 79 nt, Homo sapiens
cagguccaguaagacguacuauugguuuauaccuuuuuacauaaauuguacuacaccauaguacugaguacaccaccug

SEQ ID NO: 54041 - RNA, 84 nt, Homo sapiens
cagggcuguguagugcaaugagaaggggcucuggagccaaacacagccagguuccaacccugguuccuucauuuuccaguuuug

SEQ ID NO: 54042 - RNA, 90 nt, Homo sapiens
caggggaaucacuugagcccaggagauggagguugcagugagccgauauugcuguugcacucuagccugggcaacaagaaugaaacccug

SEQ ID NO: 54043 - RNA, 60 nt, Homo sapiens
caggguaaaccuaugagauagcuguugcuauugacauuucuaucucaguguuuacauuug

SEQ ID NO: 54044 - RNA, 76 nt, Homo sapiens
caggcccagcagggagaccaucucuuccuuaggacuugccuuaggucccauguccucccugaccacugauggccug

SEQ ID NO: 54045 - RNA, 82 nt, Homo sapiens
caggcuaauugucauacauuugcaugcuaaaagacacucccaccagugccauggcaguuuacaaaugccaugacagugccug

SEQ ID NO: 54046 - RNA, 98 nt, Homo sapiens
cagggccuccaagcucacucagaaaucuuguguugaauggugcagagcuaaguuguucacucugcaguaucauauuagaagagauuugguuuacccug

SEQ ID NO: 54047 - RNA, 78 nt, Homo sapiens
cagcauuaugcacuuuacucauuuaagguauguugugaugugaacaaaucagccuguagaagaguagaugaccugcug

SEQ ID NO: 54048 - RNA, 116 nt, Homo sapiens
cagccaagugcucagcacauaaagugcuuacuaaguugccaacuuaauagacuccuauggauucauuuauuuggcaacucaguaagcgcuaauauaugucauauguaucauuucug

SEQ ID NO: 54049 - RNA, 62 nt, Homo sapiens
cagccaaucugauucuauaccauuucuuagaacaaagaagagugcuauagauuagauuucug

SEQ ID NO: 54050 - RNA, 75 nt, Homo sapiens
cagccacugugaaagauuuuaacugggagacuccuauacccggaagucuuucaguucugaaucucggcaggucug

SEQ ID NO: 54051 - RNA, 55 nt, Homo sapiens
cagcagguuuuuaucaguuaagcugcuucuaggcaacugguagaaaugucugcug

SEQ ID NO: 54052 - RNA, 57 nt, Homo sapiens
cagauuguagcaauugaguacaggauauuccugugaacaaaauuuguugcauauuug

SEQ ID NO: 54053 - RNA, 102 nt, Homo sapiens
cagauuugcuacacggguaaauugcaugcugcggggguuuaguguacagaugauauugucacccgggcaguaagcauaguacccaauagguaguguuuucug

SEQ ID NO: 54054 - RNA, 84 nt, Homo sapiens
cagcacgugcuacuggaagaauaaugggccuuagagcuagcaaaacugaguucaaauccugcuuaugcuaccaguugugugcug

SEQ ID NO: 54055 - RNA, 97 nt, Homo sapiens
ccaauauuaaugagaaaugagucacuuauuauuggggugcaaauagagagauaaaugacaucaguaauuaagucucaagcccucuuugguauaaugg

SEQ ID NO: 54056 - RNA, 130 nt, Homo sapiens
ccaauuugauucuucugcaugugaauauacaguuuuccucacaaccuuuauugaagagacugcccuuuccccauugucuguucuaguuguaugugauuaguugacuguaaauguguggaauuauuucugg

SEQ ID NO: 54057 - RNA, 64 nt, Homo sapiens
cauucuuguauagguuuuuguaacacaaauuuuuauuucucugugauaaaugccuacaagggug

SEQ ID NO: 54058 - RNA, 55 nt, Homo sapiens
cauugcacuuagacaacuuuuguuucaaguguguguugaggguauaagugcaaug

SEQ ID NO: 54059 - RNA, 55 nt, Homo sapiens
cauuguggucaaggauggaccacauauaugaugguggucccauaagauuacaaug

SEQ ID NO: 54060 - RNA, 87 nt, Homo sapiens
cauuugaugaugauuccauucgaguccauuugaugaugauuccauucgaguccauuugaugaugauuccauuugaguccauuugaug

SEQ ID NO: 54061 - RNA, 55 nt, Homo sapiens
cauuugguguaguucucuguuguuguacccauaacauuguugauuauacuaagug

SEQ ID NO: 54062 - RNA, 67 nt, Homo sapiens
cauuuguucagucugaauacaaaucaaggguaaaaaccacauggcagugucacagacaugacagaug

SEQ ID NO: 54063 - RNA, 79 nt, Homo sapiens
cauuuuacuccugacugauuacauuacauauugauauuagugagcaucaguauguagugcaaucagucaggagaaaaug

SEQ ID NO: 54064 - RNA, 115 nt, Homo sapiens
cauuuuauuaauggagcuaauugcaugcacuguauaggaucuugcggaaaauaaauuacaguauauaaaaugucuccuaguauggugcauuguacaugguugacauucaaaaaug

SEQ ID NO: 54065 - RNA, 78 nt, Homo sapiens
ccaaaggguguggauguuuccuuauugauaucaucaaagaucuaguguaucaagaugacaaacuuugcucccuguugg

SEQ ID NO: 54066 - RNA, 96 nt, Homo sapiens
cauuauguuuuauaaaaauuuucuauuaucuagaaauuucagcagauuggcaguuggaaguauagauaauugaaaguggguacuauaauaguagug

SEQ ID NO: 54067 - RNA, 75 nt, Homo sapiens
cauuauuacauucagcuguuguuucaaugugucugaaaggguaaaugacuauuuagauggccuggguguguggug

SEQ ID NO: 54068 - RNA, 120 nt, Homo sapiens
cauuauuaucucuaucugacauauaaggaaacuggaucccuuaaaguuaaguuaccuguccuggaugacauagcuauuaagugaugccaagucuccuuuauuuuagauguguauauaaug

SEQ ID NO: 54069 - RNA, 60 nt, Homo sapiens
cauucauguugcuuguucuacuuaauauauuaagugcuauguggaaagcagcaugauaug

SEQ ID NO: 54070 - RNA, 129 nt, Homo sapiens
cauucccugagauaggucacucucccuuucugaagcucugacucuucaucgauaagauagggacacuaaucuucucuugaaggguggggaagauaagaugaagugguaagugacuucacauaguggaug

SEQ ID NO: 54071 - RNA, 101 nt, Homo sapiens
cauuccgucaugcauguuuagacuucauggcuuuuuaaaucauguuguagugugguuacaaugaagauaaaagcuagaggaaaacacuccaugcaggaaug

SEQ ID NO: 54072 - RNA, 102 nt, Homo sapiens
cauuccuaccuuaaucuucagagauccuugaaauguuuagaaguuuggauuugauaguacauccaaagcugaagcauuucuaguucuuucaagcagggaaug

SEQ ID NO: 54073 - RNA, 76 nt, Homo sapiens
cauggggaguacuugagauaggagcuguuguucucuucuggccuaaacuaagacccgucuccugucucaccccaug

SEQ ID NO: 54074 - RNA, 57 nt, Homo sapiens
caugguguauaugugccaaugggugcagcacaccaacauggcacauguauacauaug

SEQ ID NO: 54075 - RNA, 63 nt, Homo sapiens
caugucuuuuauucugugugaugaaacauucugccuaucuccucacacagaauaaaagaugug

SEQ ID NO: 54076 - RNA, 66 nt, Homo sapiens
caugugcaaagcacuguucagcaggggagcucaccugagccuugcugucaagggcuuuagcaugug

SEQ ID NO: 54077 - RNA, 78 nt, Homo sapiens
cauguguguguaugcacaugugccugggugugugugucugugcaugucccugggugugugugcaugcaugugugcaug

SEQ ID NO: 54078 - RNA, 94 nt, Homo sapiens
cauguucaguauugaaauccauucuuggcuuugcuuuaauagcagagauuugacuucugacauuguugaucacagccauggaaauaaccacgug

SEQ ID NO: 54079 - RNA, 102 nt, Homo sapiens
cauuagaagaauugcugcuugcuuaucuccuuuuaaggggccaucaguaugaaagguuaauauuuucaauacuguugauccuuaugugauaguaaucugaug

SEQ ID NO: 54080 - RNA, 75 nt, Homo sapiens
cauuauauuacagcacuguuaaagauacugaaauauauugaaguuuuaccuugacauugcuguaguguccagaug

SEQ ID NO: 54081 - RNA, 87 nt, Homo sapiens
ccagaaauuaaaggcggauagauccuucucaaaaucaaacgcucucuuugguuuugcacuguuuuaucugacaauuuugaguuuugg

SEQ ID NO: 54082 - RNA, 111 nt, Homo sapiens
ccagaccucugaggagggggagcugccuggcagaggcuggugccucagaagcuaagaagagggucuuauguaacugggacacaagccucugaggguagcaucagaggcugg

SEQ ID NO: 54083 - RNA, 72 nt, Homo sapiens
ccagaccuucagagugaggcucucggaacucacucugaaguuaaaguucuucgccucucuuugaaaguuugg

SEQ ID NO: 54084 - RNA, 69 nt, Homo sapiens
ccagaggguuaaguuucaauugaaaaguaaagguucuuuuuuagaucaacauggaacucuaucuucugg

SEQ ID NO: 54085 - RNA, 75 nt, Homo sapiens
ccagagucugugccucaagcuaaagaagugaaagcuccuuucauucauucauccagcuugaggaagagacccugg

SEQ ID NO: 54086 - RNA, 76 nt, Homo sapiens
ccaaguaaaugguguuuccguuaagcugaacuauaaaauguggguuacuuaaacagaaaugcagaaaggcacuugg

SEQ ID NO: 54087 - RNA, 77 nt, Homo sapiens
ccaaguugucauaagccuauuauuucuuuacauuacugaagugaaagacagcauuaauggcuaaaugccauacuugg

SEQ ID NO: 54088 - RNA, 60 nt, Homo sapiens
ccacaggugaugacauuugaaccaagccuuaaagaauuggcaagaauucuuaccgugugg

SEQ ID NO: 54089 - RNA, 78 nt, Homo sapiens
ccacccggcuugggcagcauccaugugcuuccucucccguggcacauaagcaggugucugugucuguaaaccgggugg

SEQ ID NO: 54090 - RNA, 85 nt, Homo sapiens
ccagcaugggagaaagaugagguagaagacucagcaaguuggcuuuucccaccuucuuccaucugcuuuauccuagccgagcugg

SEQ ID NO: 54091 - RNA, 64 nt, Homo sapiens
ccagauggucaccuucuugcucugucuucacaggguagagagagagagagagagggaucuuugg

SEQ ID NO: 54092 - RNA, 58 nt, Homo sapiens
ccaucacaugcuuauuuuccucauuggaaauucagaugaggacagaaagguguggugg

SEQ ID NO: 54093 - RNA, 74 nt, Homo sapiens
ccaggcuacugccuguguucacuuaaggcugaagggcuucucagucagcuuguggugaauacugcuaggccugg

SEQ ID NO: 54094 - RNA, 129 nt, Homo sapiens
ccagugccuaacaauagaggcaaacccgugagcagaaagcugcaaggucgugugcucagcaggaggugaggcugggguggcugagcagcgucuguucagugcuacuuuccucugagacggguccacugg

SEQ ID NO: 54095 - RNA, 99 nt, Homo sapiens
ccagugugcguguugcuaauuguauggcaggaggcacacggcaugcucugugugcucaucacaugcaauaggacaacauauugagccacagugcauugg

SEQ ID NO: 54096 - RNA, 61 nt, Homo sapiens
ccaucuaaagagcagguggauuuccuuugguguaauccucaccuccauuuguaugggaugg

SEQ ID NO: 54097 - RNA, 59 nt, Homo sapiens
ccaugaaagcaaauacaaaauggcugacuauaugcagcuaguauucacuuuuuucaugg

SEQ ID NO: 54098 - RNA, 103 nt, Homo sapiens
ccaugagcaaguacuuccaccucucugagcaucaguggccucaucucagaagacugcugggaagaguaaccaggaugcugggugugaagcuccuagcacaugg

SEQ ID NO: 54099 - RNA, 79 nt, Homo sapiens
ccaugaucagaugguggcaagagccaagucuucucacauaaagagaaaucacauugaaucugcuaccuacgaccacugg

SEQ ID NO: 54100 - RNA, 83 nt, Homo sapiens
ccaugcuuggaguggaagcaagggauggugugagaaauagaaaaauucuuacaucaucacauuaguuugcgucuccuguuugg

SEQ ID NO: 54101 - RNA, 58 nt, Homo sapiens
ccauggcaauggucagucuauucaaacauaagccuggcauggugcuggccucccaugg

SEQ ID NO: 54102 - RNA, 79 nt, Homo sapiens
ccaugguaauacugugauaucgagcgauugucugggccauugucccacaucuugucuggguacacaguacugaacaugg

SEQ ID NO: 54103 - RNA, 78 nt, Homo sapiens
ccagcugaaaucugggguuguuuggggaguagcugggagacacgggagacuccccgagagcugcgggugagcugcugg

SEQ ID NO: 54104 - RNA, 93 nt, Homo sapiens
ccagcuggagugcaguggcacaaugucagcucacugcaaccuccgccucccagguucaagcgauucuugugccucagccucccaagcagcugg

SEQ ID NO: 54105 - RNA, 125 nt, Homo sapiens
ccaggacaguuguaaaguacuuuguaagauauauuuugugaaaucagauagccuuuuuaaauagccuuuagaaaagcugcucuguuucuaaaauguugugacugauuuuuacuucguaacucugg

SEQ ID NO: 54106 - RNA, 62 nt, Homo sapiens
ccauuugcuagccauguguacuuggguaaguucccacacccucugcauugucugggaaaugg

SEQ ID NO: 54107 - RNA, 56 nt, Homo sapiens
cccaaaggauucauuuccaggagucugaaaagauucuggaauuuggauauuuuggg

SEQ ID NO: 54108 - RNA, 62 nt, Homo sapiens
ccaugugauuagaaauguacacagcaguacugcugaccuaaaaaauuacauuuguuacaugg

SEQ ID NO: 54109 - RNA, 76 nt, Homo sapiens
ccauuauugcaaagcguagacucuaaacauauuauuagcaucaaaaaauguuuguuuuguaucuuuguauuaaugg

SEQ ID NO: 54110 - RNA, 62 nt, Homo sapiens
ccauucagaugccugagaacagcuaagcuccguaaaguugguucucuuagccaucuuaaugg

SEQ ID NO: 54111 - RNA, 100 nt, Homo sapiens
cccaacuaaaaaauacagauuguacagguugccagugaacucugauuagggauauuuauuaauuuacuuucauaggucacuguaaccucgugcucuuggg

SEQ ID NO: 54112 - RNA, 103 nt, Homo sapiens
cccaacugcagcaguucagagaaugucuuuuuuaaccauuugauacccauuugguagaauauaguauauuggagaugugucuugaaauuggaugccauuuggg

SEQ ID NO: 54113 - RNA, 105 nt, Homo sapiens
cccaauuguuuguguguauuuaucuaagagguagaagcuugccuucuauucuuccugugagguagaagcuugccuucuauucuuccugugugcauaaauguuggg

SEQ ID NO: 54114 - RNA, 125 nt, Homo sapiens
cccaccuuggccucccaaaguguugcguuuacaggugugugccaaggugcccacucaaaaacggguucuuggcugggcacuguggcucaagccuguaaucccagcaccuugggggucaagguggg

SEQ ID NO: 54115 - RNA, 130 nt, Homo sapiens
cccaccuugguuucacaacaugcugggguuacaguugugagccaccaugcccuggccaagugaaauuaggaaugggcugggugugggggcucaugucuguaaucccuacccuuaggcaagcagaggcggg

SEQ ID NO: 54116 - RNA, 68 nt, Homo sapiens
cccagagagguggguggagcccccaauuccugaaaaauugggggcuccacccaccucuaauguauggg

SEQ ID NO: 54117 - RNA, 116 nt, Homo sapiens
cccagcaccccccgcccagcuccccuaaugcacuuuccuccaaggcuggugaacuagacagaccggccaugggaaggaagaguguguaaugaccguggcaggggagggcugcuggg

SEQ ID NO: 54118 - RNA, 82 nt, Homo sapiens
cccagcugauuuuccugccuccuggcugguccagugugacccaguagacagaacaauggacuaggagcuaggaagaucuggg

SEQ ID NO: 54119 - RNA, 56 nt, Homo sapiens
cccaggaguuggaggcugcagugagguaugaucaugcuacugcacuccaccuuggg

SEQ ID NO: 54120 - RNA, 56 nt, Homo sapiens
ccauuucacucuuccugaaggacccggcaggcggguggaggaggggugggaaaugg

SEQ ID NO: 54121 - RNA, 56 nt, Homo sapiens
cccagggggcagagguugcagugagcugagaucgcgccauugcacuccacccuggg

SEQ ID NO: 54122 - RNA, 56 nt, Homo sapiens
cccaugauucaauuaucucucacugggucccucccaugacaagugagaauuauggg

SEQ ID NO: 54123 - RNA, 64 nt, Homo sapiens
ccccagugcucuucacacugguuuaggauggagacauauauggauaguuuacugaagagugggg

SEQ ID NO: 54124 - RNA, 104 nt, Homo sapiens
ccccaucacgggauugucgacuucaucaaauccacaagaccccuuuucacugugaaguaauauagucacagguucuugggauuagaggaugaacaucucugggg

SEQ ID NO: 54125 - RNA, 78 nt, Homo sapiens
cccccuugaggaggcagucuaucucuuaguagagcucaagcgcugugcuaggagauccacugcucucuucagagccgg

SEQ ID NO: 54126 - RNA, 97 nt, Homo sapiens
augguuauuaugagguggggguuuuccugcacaagcucucuuuuugccugaugccaaccagguaagaugugacuugguguuccuugccuucugccau

SEQ ID NO: 54127 - RNA, 66 nt, Homo sapiens
augggaaguauugccaucuuaacgauauuaaauccuccaauucauaagcaugguguaucuuuccau

SEQ ID NO: 54128 - RNA, 60 nt, Homo sapiens
augccucccaaaaguguucauauuuuaauucucagaacaugugaacauguuggguggcau

SEQ ID NO: 54129 - RNA, 70 nt, Homo sapiens
auguaugucuugucuauggcugcuuuuguauuauggcagcuaaaccgaguagcuaucacagagacuacau

SEQ ID NO: 54130 - RNA, 113 nt, Homo sapiens
auguaaauccuugcauauggcuuaacacacgugggcaaugugcacauuuacacauaguccagccuauacaugugcacaugcuuacaugugauuugauauguauggguguauau

SEQ ID NO: 54131 - RNA, 82 nt, Homo sapiens
auguaaguaguuuauauucaaugauuaguaucaguuggccaagccagucugugcuugauuauaugagugugugugugugcgu

SEQ ID NO: 54132 - RNA, 60 nt, Homo sapiens
auguaauguuaaauugcuaauuugagaucuuucuuucugaaauaggcuuuagcauuauau

SEQ ID NO: 54133 - RNA, 71 nt, Homo sapiens
auguagcuauaguuauuuuuaauccuuuuguauuuuuacucuuacacuggaguuaaaggugauuucugcau

SEQ ID NO: 54134 - RNA, 78 nt, Homo sapiens
augcucuuagugcauuuguucugugucaggcacuguuuuccauaguguuuguccagugccaggugcugcuguaaguau

SEQ ID NO: 54135 - RNA, 75 nt, Homo sapiens
augcugcguaucaacaggguggccaguguauuuuuacauguaaguacacaaaggcacucuguuguuaccacgcau

SEQ ID NO: 54136 - RNA, 85 nt, Homo sapiens
auggaaaugauuuaccuuuuguuuuaaguaaucagagaagagaacugcaaaugcaguuuguguacucaggaaguaaauuaucugu

SEQ ID NO: 54137 - RNA, 63 nt, Homo sapiens
auggaauguauagucauguagguuaacuuugugaguauacuguuuaaugucuguacagucuau

SEQ ID NO: 54138 - RNA, 70 nt, Homo sapiens
auggacacuaaggaaggacugaaaggacaggagcuauaggcugcucucucuuccccuuuccuuguuccau

SEQ ID NO: 54139 - RNA, 76 nt, Homo sapiens
auggaccauagcauagucagcuucgcugauucagcucuuuucacuagucaccguggcugaacuauuuugucaccau

SEQ ID NO: 54140 - RNA, 60 nt, Homo sapiens
auggacuuggaagccauuauucuaagugaaguaacucaggaauggaaaaccaaguaucau

SEQ ID NO: 54141 - RNA, 116 nt, Homo sapiens
auggagguguaaagauauccagcuuuauuaucuuugcauaacaauguauguguguauaucuguaaguauaugcauacauguaugcaggaauguuaauuguuguauuacacuucuau

SEQ ID NO: 54142 - RNA, 55 nt, Homo sapiens
auggaguguggaacugggaaucugacaaguauggauuccaauuuuggcacaccau

SEQ ID NO: 54143 - RNA, 97 nt, Homo sapiens
auggauaaaguacaucugucuaagaaaagagucuauaaacagauuguugaacuuuuuauuugucauagaugauuuuuuucggggggaguuuguuugu

SEQ ID NO: 54144 - RNA, 90 nt, Homo sapiens
auggcacagagguauuggaaggagugucagaugcucagguagaaugaaucuaucaacucuggcacuucuguguacuucugagucugccau

SEQ ID NO: 54145 - RNA, 86 nt, Homo sapiens
auggguaaauugcaugucauguuuaguguacagauuauuuugucacccagguaauaagcauaauaucugacaggcaguuuuuccau

SEQ ID NO: 54146 - RNA, 69 nt, Homo sapiens
auggguagggauagagagcagauuuauguuuuaaccauauguuaaucuguucucuguauucuauaccau

SEQ ID NO: 54147 - RNA, 77 nt, Homo sapiens
augguagcaaagcugagaugagaaucaguucuaauuuuaaauugagagcucuuuucauuauacuacgcugcugcuau

SEQ ID NO: 54148 - RNA, 72 nt, Homo sapiens
augguauuucuaguucuagauccuugaggaaucaccacacugucuuccacaaugguugaacuaguuuaccgu

SEQ ID NO: 54149 - RNA, 72 nt, Homo sapiens
augguauuucuaguucuagauccuugaggaaucaccacacugucuuccacaaugguugaacuaguuuacggu

SEQ ID NO: 54150 - RNA, 65 nt, Homo sapiens
auggucccauucauucacguauuugucuacuaauugacagcuauugaguaccuaaugggaaccgu

SEQ ID NO: 54151 - RNA, 82 nt, Homo sapiens
auggucuuccaaaaauaauuauaaguuaagaaaauaacuuucaaaguaguaguuuuguguauaauaauggcuaggaagccau

SEQ ID NO: 54152 - RNA, 66 nt, Homo sapiens
auggugaaagaggacauccucaucuuguuccucaucuuagaggggaaacauccagucuuucaccau

SEQ ID NO: 54153 - RNA, 74 nt, Homo sapiens
auguuugagaugauggauaugcuaauggccauguguaauggccuauuugacauuauauacacguaucuaaacau

SEQ ID NO: 54154 - RNA, 93 nt, Homo sapiens
auguuuuaagguuaagguuaggaaguaauaaguuugguucuaauccaaauauuggugccugauucuguguuauuuauaacugccuuguaacau

SEQ ID NO: 54155 - RNA, 72 nt, Homo sapiens
auuaaugaggcaggaaaggcguaucugggaaauaaaaucaucaucuaagcauggcuuuucuucuuuguuaau

SEQ ID NO: 54156 - RNA, 114 nt, Homo sapiens
auuacaauaggauauuuagagguaaaggaggcaagcuuauguucuuuaucuaauuucacaugccaacagauugcuauuuauggauugucuccuugugccauuuccuauuguggu

SEQ ID NO: 54157 - RNA, 83 nt, Homo sapiens
auuagaugagauauuuuauaagaucauuuuagagguggacuuuguucauguauacguguuuuaugauaaauaucuugccuagu

SEQ ID NO: 54158 - RNA, 128 nt, Homo sapiens
auuagcugggugugguggcaggugccuguaaucucagcuacuugguuggcugaggcagagagcgauccucacaucucaaccucccaaguagcugggauuauaggcacgugccaccaugccuggcuaau

SEQ ID NO: 54159 - RNA, 128 nt, Homo sapiens
auuaggaacaguaucacuugagggguguaccucuacugcgauaucaggcauaauaacauccucuccccccgaauauuaagaacaauaucacagguggacugcacacccucugugauauugaaaauaau

SEQ ID NO: 54160 - RNA, 64 nt, Homo sapiens
auuaggaagcuaauaucuguauccucuaugguuaugagauagaugaagauguugccuuuuuaau

SEQ ID NO: 54161 - RNA, 81 nt, Homo sapiens
auuaggaguaacaggauccaaagaauguauugaacuucauuguuuuaguuggcaucuuugcgagccuuuuaaugaucugau

SEQ ID NO: 54162 - RNA, 69 nt, Homo sapiens
augucuucuuuauuuuuaguauauucuuacuuagaaguuuggagaauguaaacagaauagaggagauau

SEQ ID NO: 54163 - RNA, 86 nt, Homo sapiens
augucuuugcuaaugugaauagugcuguaaugaacauaagcauacaugugucuuuaugacagaacgauuuauauuccuuuggacau

SEQ ID NO: 54164 - RNA, 94 nt, Homo sapiens
augugcugguuuagaguguuagaaauggauauuguauuaguucucuaugcuucauaaugaguuaucacaaacuuagcaguuuaaaacaacacau

SEQ ID NO: 54165 - RNA, 63 nt, Homo sapiens
auguggucugugcaagagugaaaggagcuaaagaugacuccaaaagcuguugucagagcacau

SEQ ID NO: 54166 - RNA, 56 nt, Homo sapiens
auguguacugagcacuuacugugucucaggccuccuccuaagugcuuuaaacacau

SEQ ID NO: 54167 - RNA, 74 nt, Homo sapiens
augucggaggaugcacuuugucaguaaguuaggcauucagucuucacugucaacacaaaugcauucugugacau

SEQ ID NO: 54168 - RNA, 105 nt, Homo sapiens
auguuaaggacccauuguuuggguccuuauugauaccaauggccauaauaaucucuaaauuuauuuauucauuaacagggaccaaagucaauagggccuuaauau

SEQ ID NO: 54169 - RNA, 67 nt, Homo sapiens
auguuccugugauaguuucuguuuugaagaugaaugccuguuaucacagaggguauccuagagauau

SEQ ID NO: 54170 - RNA, 72 nt, Homo sapiens
auguucucaucacuucaagcagauacccucuucuucuuucucacugggaucaaagugaauuaaugagaauau

SEQ ID NO: 54171 - RNA, 63 nt, Homo sapiens
auguugaaccagccuuguauuccuggaaugaauccuaccuggaaugaaaccugguuaugauau

SEQ ID NO: 54172 - RNA, 83 nt, Homo sapiens
auguugcaguuuaauuauccuauugaaaauguguuaaacgcucccaaguacaucaugaauaaggauuauuaaauuugcagcau

SEQ ID NO: 54173 - RNA, 67 nt, Homo sapiens
auguuuacaguauugcaaggacuaggaaaucccucauugauaccaguccugccagucuugucaauau

SEQ ID NO: 54174 - RNA, 69 nt, Homo sapiens
auuauuggucuaugcaagauuucuaugucucccugauucaagcuugggaguuuguauguuuccaguaau

SEQ ID NO: 54175 - RNA, 70 nt, Homo sapiens
auuauuuuggcucugucuguaucuuugcucuauuccuauuugagcaaagacagagagaagccagaacaau

SEQ ID NO: 54176 - RNA, 70 nt, Homo sapiens
auucaccauuucuugcugaaacaaauaaaccagaauuaacuguguaucuauucagcaaaggaaugggagu

SEQ ID NO: 54177 - RNA, 59 nt, Homo sapiens
auucagaggggcagcugucuugggccccagugguuucccagaucccuguuccucugaau

SEQ ID NO: 54178 - RNA, 99 nt, Homo sapiens
auucagcuuauaauccauuauuaucacuguuuugaugcucggacgcucugagacgauccgggcaucaaaacagugauaguaaugcauuauaagcugaau

SEQ ID NO: 54179 - RNA, 60 nt, Homo sapiens
auuccauuuguuaucacacccguauaaacacccauuuugaugggugggccacaguggagu

SEQ ID NO: 54180 - RNA, 82 nt, Homo sapiens
auucuccuagcugcacuuccugcuacugggaagggugggguugcuuuccuggggagcaguaguaggcaggcagcuggagaau

SEQ ID NO: 54181 - RNA, 70 nt, Homo sapiens
auucuguauaauuauagcuguucaggguauuuugguuuugcauggauaucccagugaugauugauaggau

SEQ ID NO: 54182 - RNA, 82 nt, Homo sapiens
auucuuuuguucucuauuguacauguuauagauuuuuaaguugucuggaagucaagaugcauaugcaaguauacaaaagggu

SEQ ID NO: 54183 - RNA, 67 nt, Homo sapiens
auugaguacuuagugucauauacuaggaauuuccuuugguauuuucaugugcacuaugucauuuaau

SEQ ID NO: 54184 - RNA, 80 nt, Homo sapiens
auugcaaguguccuuccaugagugagugaauugcuaaacaaacgguaaugcacucgaaucauggaauauuauucagcaau

SEQ ID NO: 54185 - RNA, 65 nt, Homo sapiens
auugcauguucuuacucauacaugggugcuaaaaaauguguucauguggauguagagaguggaau

SEQ ID NO: 54186 - RNA, 68 nt, Homo sapiens
auaguaggaauuugguaaauauuuguugaaugagugaauagauaaauggauaaaugaauaccuacugu

SEQ ID NO: 54187 - RNA, 77 nt, Homo sapiens
auagugcugcaaacaugagaggaagugcagauaccuaucucuuugauacaccaauuuccuuuccuuuggguauauau

SEQ ID NO: 54188 - RNA, 107 nt, Homo sapiens
auaguguaguagagcuaggaggagaggguccuggagaagcguggaccgguccggguggguuccggcagguucucacccucucuaggccccauucuccucugcacugu

SEQ ID NO: 54189 - RNA, 89 nt, Homo sapiens
auaguuaauggcucagcuaugaaauggaccgucaugcaaugucuaagacauuugcaaagaccucuucacuuccauggagucauaauuau

SEQ ID NO: 54190 - RNA, 101 nt, Homo sapiens
aguuuauucuuucaugugcauuuuagaaaaucagcgugucaaauccuucaaggguucuguuuggauuuggcagcugcuucaugggaugcgaagguuaaacu

SEQ ID NO: 54191 - RNA, 66 nt, Homo sapiens
aucagaaucucuagaggacuguccagggaauguuuauuuuucaaaccuccuccaggggauacugau

SEQ ID NO: 54192 - RNA, 63 nt, Homo sapiens
aucagaaucucuagugggaccaagagaucuauauuuuaaacaaguacccuaggugauucugau

SEQ ID NO: 54193 - RNA, 75 nt, Homo sapiens
aucaugcacuuggcaggaugauucccaauuggggagauuucgccccucaggggacaccuggcaaugccuagagau

SEQ ID NO: 54194 - RNA, 55 nt, Homo sapiens
aucagugcauguuuguugagcuaaacuuuuaucucaccgacgaggcugcacuggu

SEQ ID NO: 54195 - RNA, 69 nt, Homo sapiens
auccuuuggaggauccugagcugauuacuggaagggccaguggauaguaaagucagauucccagagggu

SEQ ID NO: 54196 - RNA, 81 nt, Homo sapiens
aucauugccaucacuagaucauagguaaacacuacugaaugcuucagacgugauuaccugggaucuagugacggcagugau

SEQ ID NO: 54197 - RNA, 70 nt, Homo sapiens
aucguuugaaccugggaggcagagguugcaguuagccaaaauugcacuacugcacucccaccugggcgau

SEQ ID NO: 54198 - RNA, 96 nt, Homo sapiens
aucuauaaaauggggauuuauauuuaucucuuaugauauaaggaugguaaaaaauagcucaucauggagaugauuaugaaucacuuauauguggau

SEQ ID NO: 54199 - RNA, 111 nt, Homo sapiens
aucucaacuaaguacaucugugaagauccuguuuccaaaucaggucacauuuugagguucuagguggacaugaauuuuggaggcauacuauucaacucaguauguggagau

SEQ ID NO: 54200 - RNA, 61 nt, Homo sapiens
aucucaguuaauuccaucuuuccagcuacacaugcuagaauccuuggaguuauacuuggau

SEQ ID NO: 54201 - RNA, 56 nt, Homo sapiens
aucuccaaauacagucauauuagggguuagggcuucaacauaugaauuuuggagau

SEQ ID NO: 54202 - RNA, 97 nt, Homo sapiens
augacacuaaguucuaggguacaugugcacaacaugcagguuuguuacguauguauacuugugccauguugguauguugcacccauuaacucgucau

SEQ ID NO: 54203 - RNA, 64 nt, Homo sapiens
augacccccauuucuggagcuaauccuggaauuaacauuacccuuagacuccagagugggucau

SEQ ID NO: 54204 - RNA, 86 nt, Homo sapiens
aucuguacuuuaguguaauugauagguucuaagcagguguugugccugcagcaccuagcacagugccuggccugaagaaggcagau

SEQ ID NO: 54205 - RNA, 102 nt, Homo sapiens
aucuuauuauauauuauuguuaaucucuuacuaugucuaauuuacaaauuaaacuuuaucguagguauguauguaugggagaaaacauaguauauuuaaggu

SEQ ID NO: 54206 - RNA, 65 nt, Homo sapiens
aucuucaagguuaaaguucgccugugagcauacaccuguaaucacagagguuuggccucaaaggu

SEQ ID NO: 54207 - RNA, 57 nt, Homo sapiens
aucuuuaguggcuguuuucagagagaagcaccuucaccaaacagccuagcuaaggau

SEQ ID NO: 54208 - RNA, 72 nt, Homo sapiens
aucuuuauagcagugugaaaauggacuaauucaguaaauugauagcacagaguggggcgcugcuauaaagau

SEQ ID NO: 54209 - RNA, 71 nt, Homo sapiens
augaaaagugcuuuguacagggguugaacaauguaauggaaguuggucaucucaauuaaaagcaauuucau

SEQ ID NO: 54210 - RNA, 61 nt, Homo sapiens
augaaaucauguaguuauugcaagauugcaauuugucuuugcauauauuucaugguuuugu

SEQ ID NO: 54211 - RNA, 65 nt, Homo sapiens
augaaaucuuuggcagaucuuauguacagaaugguacuuccuagguuauuguccaggguuuuuau

SEQ ID NO: 54212 - RNA, 59 nt, Homo sapiens
augaagacaucgucugggauuaucuggggagcccuaauuccaaugacagguguccuugu

SEQ ID NO: 54213 - RNA, 66 nt, Homo sapiens
augaaguuuucuggagugugaaguggauaugucuuauaaguuuaauucacagcuucaccacuucau

SEQ ID NO: 54214 - RNA, 56 nt, Homo sapiens
augaauacugcugcaaugaacauaugagugcaugugucuuuuggguagugauuuau

SEQ ID NO: 54215 - RNA, 90 nt, Homo sapiens
augcaggcagaggaaacagaggugccacaauaucaucuguuugcaucuggauucuauauugccuugccuacuuuuccaucucaccugcgu

SEQ ID NO: 54216 - RNA, 83 nt, Homo sapiens
augcauguguuaguuuggaagacauucugucugcuagaaguucugcuuauaguuguauaaugucuuucauaacugauaagcau

SEQ ID NO: 54217 - RNA, 71 nt, Homo sapiens
augagugaaugaauguuuauccuuagauuuuagaaauuaaaggagaggaacauacauuuuaaugcacuuau

SEQ ID NO: 54218 - RNA, 81 nt, Homo sapiens
augauucaguuuuugaugugcucaguuuggaaggucgguuagacuuccaugugggcuugucaaguaggcagcuggggucau

SEQ ID NO: 54219 - RNA, 55 nt, Homo sapiens
augauuccacuuucuaagaggggcuacucuagauacuucacagaaguggaaucau

SEQ ID NO: 54220 - RNA, 59 nt, Homo sapiens
augagauacuacaaaugaguuuccgguuuccggauccaaucaccuuuguugguauucau

SEQ ID NO: 54221 - RNA, 76 nt, Homo sapiens
augagauauguuaaaaguuaaaaauacagcuguugguaauguguuguaaugaaacuaacuuuugugccuaucuugu

SEQ ID NO: 54222 - RNA, 55 nt, Homo sapiens
augagaugaggaauggcccuccaggagagccagaggcuauuuccacucuucucau

SEQ ID NO: 54223 - RNA, 65 nt, Homo sapiens
augagauuugggaggggccaggaguggaauaauaugguuuagcuuuguccccgcccagaucucau

SEQ ID NO: 54224 - RNA, 65 nt, Homo sapiens
augagauuugggaggggucagagguggaauaauaugguuuggcuuuguccccacccaaaucucau

SEQ ID NO: 54225 - RNA, 66 nt, Homo sapiens
augagauuuggguggggacacagagccaaaacauaucauuuuguuucuggccccucccaaucucau

SEQ ID NO: 54226 - RNA, 78 nt, Homo sapiens
augaggaagagagaaaagugugugcagagggcaggaagaaagcccaagcucugugcauuacacuuuucucagucucau

SEQ ID NO: 54227 - RNA, 56 nt, Homo sapiens
augagggaagcucacguguccaccuggcaauugguaggagcaucugguuuccccau

SEQ ID NO: 54228 - RNA, 60 nt, Homo sapiens
auuuaccuaugaguuuguguuaguugaaacaauuggcagaaaucuuuauaguaaguaaau

SEQ ID NO: 54229 - RNA, 65 nt, Homo sapiens
auuuagagggaagagcaguguguugagaagaauuagguucaacagaacugggcuugcuuuuggau

SEQ ID NO: 54230 - RNA, 81 nt, Homo sapiens
auuuagaugacagagguaagcaagucagcauuaaaaucauuuaugguguuucuaaagcauuguccuguguuuaagcuaaau

SEQ ID NO: 54231 - RNA, 128 nt, Homo sapiens
auuuauaucccccucuccacuuuucaugcuacuuauuuguggaagaaaucagguuauuuguccuguagaguuuugcagucuagauuuugcugaauuuuucccuagcaagcauacucagauggaaaaau

SEQ ID NO: 54232 - RNA, 107 nt, Homo sapiens
auuucaccaccaucauuaacacugccauugauacugucaucucugccacacgauuaauauugccaaugagacaguuagugcagccauguuaacacugccuuugagau

SEQ ID NO: 54233 - RNA, 128 nt, Homo sapiens
auuuccucuuuugauugguuacuuuuauggagagauauuuaugguuuuaauaagauuucccucccaucuguuuugauccuaccguaaaaucaucccauguuugaugggcagccgguuguuagggaaau

SEQ ID NO: 54234 - RNA, 59 nt, Homo sapiens
auuucuccuaggaguaucaauacaagguguugacaacugauuaacuccuuuagagaagu

SEQ ID NO: 54235 - RNA, 69 nt, Homo sapiens
auuucugcagcuaaggacccccugguugccucuguggcccagcaaucacaggucuuggcugcaugaaau

SEQ ID NO: 54236 - RNA, 60 nt, Homo sapiens
auuucugcuggcagguguguuauaaagguguuuggucuucuuggcaaugucagcagagau

SEQ ID NO: 54237 - RNA, 79 nt, Homo sapiens
auuucuucugacaggaaacaugcagugauuaauaaaagcgccuccuugagcacugauuuauuuuugucucugaaggaau

SEQ ID NO: 54238 - RNA, 64 nt, Homo sapiens
auugugaauagugccacaauaaacauaugugugcaugugccuuaauugcagcaugauuuauaau

SEQ ID NO: 54239 - RNA, 64 nt, Homo sapiens
auugugaauagugccgcaauaaacaugcgugugcaugugucuuuauagcagcacgauuuauagu

SEQ ID NO: 54240 - RNA, 64 nt, Homo sapiens
auugugaaugaugccgcaauaaacauacgugugcaugugucuuuauagcaacaugauuuauaau

SEQ ID NO: 54241 - RNA, 64 nt, Homo sapiens
auugugaaugaugucgcaauaaacauacgugugcauguguuuuuauaacagcaugauuuauaau

SEQ ID NO: 54242 - RNA, 64 nt, Homo sapiens
auugugaauggugccacaauaaacauacauguccaugugucuuuauagcagcaugauuuauaau

SEQ ID NO: 54243 - RNA, 64 nt, Homo sapiens
auugugaauggugccacaauaaacauacgugugcaugugucuuuauagcagcaugauuuauaau

SEQ ID NO: 54244 - RNA, 64 nt, Homo sapiens
auugugaauggugccgcaauaaacauacgugugcaugugucuuuauagcagcaugauuuauaau

SEQ ID NO: 54245 - RNA, 64 nt, Homo sapiens
auugugaauggugccgcaguaaacauacaugugcaugugucuuuauagcagcaugauuuauaau

SEQ ID NO: 54246 - RNA, 64 nt, Homo sapiens
auugugaauggugccucaguaaacauacgugugcaugugucuuuauagaagcaugauuuauaau

SEQ ID NO: 54247 - RNA, 64 nt, Homo sapiens
auugugaauggugcugcaguaaacauacgugcgcaugugucuuuauagcagcaugauuuauaau

SEQ ID NO: 54248 - RNA, 67 nt, Homo sapiens
auugugugaaccuucuagaaucagacauauuugcaaaagauugucauugcuuaaggguucaugcaau

SEQ ID NO: 54249 - RNA, 129 nt, Homo sapiens
caaaacgaugagguugaguguguguguguguaaccuagaaucuaggucuucuuagauugaaaaucaucgcaguucuaaggaacucugauaucuggaaaaauccauacucaggcaccaaucagucauuug

SEQ ID NO: 54250 - RNA, 57 nt, Homo sapiens
caaaagugguucuuauccuuuuauuuucucuucuuagaggagacagaaaagcuuuug

SEQ ID NO: 54251 - RNA, 129 nt, Homo sapiens
caaacacaaucagcaucaccuggaagguuuugagaaugcagaaucucgugcaccaucccagauccacugaaucagaaucugcauuuuaaacaagacuccccagguaaauuauaugcauauuaauguuug

SEQ ID NO: 54252 - RNA, 130 nt, Homo sapiens
caaaccugaaaauccaaaaugcuccaaaaucuaaaacuuucugagugcagcaugaugacucaaagaaaaugcccacuggaguuugcuagaaacguuuugcagcauuuugaaucugugauuuuuggauuug

SEQ ID NO: 54253 - RNA, 94 nt, Homo sapiens
caaagaggccauggauuacugugauauaucuacuucagggaaacuuuacaauucugaaagagcauguaacacaguaacccacaguuuuucuuug

SEQ ID NO: 54254 - RNA, 90 nt, Homo sapiens
auuuuguuaggacacauugcaggaaaguucauuauucuaggccuucaacagaauaaucuuagcaaccuccagugugauagagaacagagu

SEQ ID NO: 54255 - RNA, 77 nt, Homo sapiens
auuuuuaaauauaugcauuaauaaagggcucuacaauucccuggaguauacuuggagugaugcaaaucuuuaaaagu

SEQ ID NO: 54256 - RNA, 57 nt, Homo sapiens
caaaggcuucugaaacugcagagauaucauugcuaugcaagaaacccagagccuuug

SEQ ID NO: 54257 - RNA, 63 nt, Homo sapiens
auuuucacuguauuguggaagaauacagaaagaagaaacacuuuucuacagucacaggaagau

SEQ ID NO: 54258 - RNA, 71 nt, Homo sapiens
auuugugccuuuucugagcaaugagcagagcacuguguguguggccauagugucaggaaagggucgcaagu

SEQ ID NO: 54259 - RNA, 60 nt, Homo sapiens
auuuuacaaagugggaaacgaagguuccucuuaggaaccuaguugucaccuuuguauaau

SEQ ID NO: 54260 - RNA, 57 nt, Homo sapiens
auuuggaaaaauccaccuugaucucauagcaaaccugagaugguggcuguuucaagu

SEQ ID NO: 54261 - RNA, 88 nt, Homo sapiens
caaagugacagcgauucuggcuugugaacugucuucucacuugggacugagauuaacagcauacaggucaauuauugcugucauauug

SEQ ID NO: 54262 - RNA, 77 nt, Homo sapiens
caaguagauuuuuuauauggucaauauuguuuccauuucuaagggcauaauagcugaucauuuagaaguaucacuug

SEQ ID NO: 54263 - RNA, 83 nt, Homo sapiens
caagauaaugaaaguuaaguauuuagcaugaugccuggcaccugacgggugguccaggaauguuaguacuucuuaguguuuug

SEQ ID NO: 54264 - RNA, 68 nt, Homo sapiens
caagcacaggggauuuaucagggcagugaaacuaguaugguaauacuguaauggugguuccgugcuug

SEQ ID NO: 54265 - RNA, 66 nt, Homo sapiens
caauuuaguaaauuuuucaucuugccugcacuuaaagguuggcuaugaagucguuacuaccaauug

SEQ ID NO: 54266 - RNA, 64 nt, Homo sapiens
cacaaaauuccagguggcgccauucacaugguggccauuaugaauggcaccaccuaggguugug

SEQ ID NO: 54267 - RNA, 65 nt, Homo sapiens
cacaaagaguuuguagaaacuccauaguacucaaaagguuacaaguggguuugugcaggagugug

SEQ ID NO: 54268 - RNA, 91 nt, Homo sapiens
cacaaauauuugcuccuguguuauaauugccuacaguauucaacagaguaacauacuguauaggauuguagccuaggagcaauaggcugug

SEQ ID NO: 54269 - RNA, 82 nt, Homo sapiens
cacaaugugguugaaagagcauggacuugaaauucaggcuggucugguucaagucuuggcuuugccaccuacuaaccaugug

SEQ ID NO: 54270 - RNA, 71 nt, Homo sapiens
cacaauugaagggagaaauggacugaagcacaauaauacuaagagauuucaguacuccacuuucaauagug

SEQ ID NO: 54271 - RNA, 72 nt, Homo sapiens
cacaauugucagugcuguuuaaauuguauccucucucucucuuaauugaacuuuugucacugacauguugug

SEQ ID NO: 54272 - RNA, 97 nt, Homo sapiens
cacacacacauauauacauauauaugcacuauacacacguauauauauauauauauauacguguguguauguaugugugugugugugugugugugug

SEQ ID NO: 54273 - RNA, 55 nt, Homo sapiens
caagugaauaguugcucucagauaaauagaauauaggaaggcauggguuuacuug

SEQ ID NO: 54274 - RNA, 60 nt, Homo sapiens
caagugaaugaugugaaguguaaacaaccaucuauguuucauguuacugucauacacuug

SEQ ID NO: 54275 - RNA, 63 nt, Homo sapiens
caagugaaugaugugaaguguaaaccaaccauuguuguguuucauguuacugucauacacuug

SEQ ID NO: 54276 - RNA, 93 nt, Homo sapiens
caauaugaagaaaaagucaagaaucucagcaucuuuggcucugacaucauagauggaaaaggcuugguucuuugaugacauuuuugaguauug

SEQ ID NO: 54277 - RNA, 78 nt, Homo sapiens
caauguuaauacugagaugugagguacuaucccagccaucauguugauuguuaccuggauauuuuguguucuccauug

SEQ ID NO: 54278 - RNA, 84 nt, Homo sapiens
caauucuggucuuuaugacugcaaagcauauacucuuaacccaaacuggaagauauguuaguuauaaacucuuugccggaagug

SEQ ID NO: 54279 - RNA, 66 nt, Homo sapiens
cacagaauucauuggauuaccuauugggacaaaucaauucuagccauguaaaccagugagucugug

SEQ ID NO: 54280 - RNA, 78 nt, Homo sapiens
cacagggcuaucccagaaacucggguuucucuugagaugccagcugagacucccgucuucucuguggaaagcccugug

SEQ ID NO: 54281 - RNA, 103 nt, Homo sapiens
cacagucucagguaguaucuuuauagcagugugaaaacagacugauacagagaauugguaucaggaguuugggguacugcuauaaagauaaacugaaaaugug

SEQ ID NO: 54282 - RNA, 61 nt, Homo sapiens
cacaguguucauagccaucaggaacuuggaaaacaaacuuuggugaaugcgagcaacugug

SEQ ID NO: 54283 - RNA, 101 nt, Homo sapiens
cacaguugagcacuuuuagacacuagcugcaaagggagagaugauugauucauuauuaaucucuuccaaccuuugucuauggcgggaacgugcuaccugug

SEQ ID NO: 54284 - RNA, 57 nt, Homo sapiens
cagaacugaccucugauucuaggacugaccucugacccuggaacugauucaguucug

SEQ ID NO: 54285 - RNA, 83 nt, Homo sapiens
cagaacuguguuuucauugguuaaucaccgguguccagugaucuguccuucauagccugugaaaauuuauaacauccuuucug

SEQ ID NO: 54286 - RNA, 68 nt, Homo sapiens
cagaagagagcaagauuguucccauuuucuauuuuucuaguaggaauuaucuucaucuugccuuucug

SEQ ID NO: 54287 - RNA, 65 nt, Homo sapiens
cagaagcuggugccccgggggcaguuggacagcccauggacauccccgggagcaccagcuuguug

SEQ ID NO: 54288 - RNA, 74 nt, Homo sapiens
cacuugauuccgaaaugaggcuuuugcagacguaauugaggaugucaagaugagaucauucuggaauuagagug

SEQ ID NO: 54289 - RNA, 91 nt, Homo sapiens
cacuuuacacuguaucuuccuccaggcaauugaguuauuuggaaccagcuaggggucagugucugugauggagaggugcagucuugaggug

SEQ ID NO: 54290 - RNA, 110 nt, Homo sapiens
cagaaagacacugcuuggaggcagggacuccugagacucacaggcuccccagcacggccacuggggacacaggccaguccaggggccccagcccuuugguucccuuucug

SEQ ID NO: 54291 - RNA, 88 nt, Homo sapiens
cagaaagggugcggccuggcugacagcuuaauuccagcuuuacgaaacccugaguagagaauucagcuaaggugagcccagauuucug

SEQ ID NO: 54292 - RNA, 66 nt, Homo sapiens
cacuagaaugucagcuucuugagggcagagauuuuuaucuguuuuccagcuguugcauucccagug

SEQ ID NO: 54293 - RNA, 73 nt, Homo sapiens
cacuguaauucuuggggcugcucugacaauuaacaaacacaaauguccacguagcaccuuagcauuucuagug

SEQ ID NO: 54294 - RNA, 65 nt, Homo sapiens
cacuuccugaaauggauuuggugauacuucucauugaggugucaugaacucacauucugggggug

SEQ ID NO: 54295 - RNA, 74 nt, Homo sapiens
cagaaugagacuaagugacauugugcccauuugagcuuacaccuuaagaggccuugugugcauuuucucuuuug

SEQ ID NO: 54296 - RNA, 73 nt, Homo sapiens
cagacacguggagaugguugacaaauguugcccgaaaauuugggaucuuggcaaucaauucugacgucuucug

SEQ ID NO: 54297 - RNA, 64 nt, Homo sapiens
cagacaugggacauagauccuugagguuucuggugaaaucugcacaucuguguuuuuguaucug

SEQ ID NO: 54298 - RNA, 83 nt, Homo sapiens
cagacucccaggcccacuagaacuagaacugcugggguaggaccugcccacaagcaucuuuuuagccuucucuggugauucug

SEQ ID NO: 54299 - RNA, 79 nt, Homo sapiens
cagacuggggagagaaaucaaaaccugaacaccaauauggcagugaguuuacugguuuuauauauuucucccaaaucug

SEQ ID NO: 54300 - RNA, 77 nt, Homo sapiens
cagagaagauaugcauauauuuauacauuuauguacauaacaucacuguguauguauaugcaggguguuuuacuuug

SEQ ID NO: 54301 - RNA, 95 nt, Homo sapiens
cagagaggaugagagacaugccuaggguugcacaguccauagcagggaagucaguguucaaacccaggucugucugaugcccauacccuugacug

SEQ ID NO: 54302 - RNA, 81 nt, Homo sapiens
cagagaucuaauuuaccauuuacuuuuuaaugacaaugguaaguuuuucugucauguaaagaguaaauggugacuuuucug

SEQ ID NO: 54303 - RNA, 108 nt, Homo sapiens
cagaguugauuccagaauggaauauguguaaagaguucacauuuguuguaucuuaguugguauuccacaauaugauuuuuaauagaucuuucauuuugaucucaucug

SEQ ID NO: 54304 - RNA, 64 nt, Homo sapiens
cagauauagcuaugggauguauuugcaagacagaacuuagcugaacuugcauagcuguuuccug

SEQ ID NO: 54305 - RNA, 95 nt, Homo sapiens
cagaucaacugucauaucacagugcuuguguucagguaaccuuuauuuuacuaauaauggccccaaagcacaagagcagggaggcaguugauuug

SEQ ID NO: 54306 - RNA, 83 nt, Homo sapiens
cagaugaucucaugugcuguuagaggaaguguaaauuagucaacacuuucuggagcugcacauauucugauuuauccaaucug

SEQ ID NO: 54307 - RNA, 76 nt, Homo sapiens
cagaugauuuucucuuaagugcuuuuuagauaugguuuugucaaaugguaaaauagaauguauuaaagagaaucug

SEQ ID NO: 54308 - RNA, 75 nt, Homo sapiens
cacgaugcaaaugcuucacaucucuggugauuugaauugaaucacacuugauguugagcaacacaccugcuugug

SEQ ID NO: 54309 - RNA, 67 nt, Homo sapiens
cacucuggcaggccgaggcagguggauuaccugaggucaggaguucaaaucgagccuggccauggug

SEQ ID NO: 54310 - RNA, 92 nt, Homo sapiens
cacugagccgccugcauggaggaggggcgccugcacucugugucuuuggccggauguggcacuugacuuucucgcaccuguggcacucagug

SEQ ID NO: 54311 - RNA, 63 nt, Homo sapiens
cacugagcugauagaauuccaguuagaaagcaaagaaacuuggcauuuuaguuagcuucagug

SEQ ID NO: 54312 - RNA, 87 nt, Homo sapiens
cacugaguauauauguuuguuuagaugguaaaucaguauugagauauacuggacuuaaugaugaauuguauauacaaauauucagug

SEQ ID NO: 54313 - RNA, 108 nt, Homo sapiens
caccugcauugcccugaaccagcuggcucguguuuucuguccaguuccugcugguaggcaaggcugggcugggcagggcuaaugcuggggcagaaggcuuuccaggug

SEQ ID NO: 54314 - RNA, 60 nt, Homo sapiens
caccuggcuauucccucaaucugggcccuggggccauggcaauguggaaugguccaggug

SEQ ID NO: 54315 - RNA, 114 nt, Homo sapiens
caccacuggcuggcuggaauuccaagccagcaggucuuaacuugugaggugcuguggaaguggggcccacagaacaagacugcuuggcucccuggauucagcccccuuuaggug

SEQ ID NO: 54316 - RNA, 57 nt, Homo sapiens
caaggaaaagaaguauuucagaagcauccugcuuuuuaaaugcuagaauuuucuuug

SEQ ID NO: 54317 - RNA, 64 nt, Homo sapiens
caccauacauucucuauaagugcauguguguuuacauaaaugcacagaaaggauguggaaggug

SEQ ID NO: 54318 - RNA, 72 nt, Homo sapiens
caccauuauaaauugacuuauuugcuuucaaaucucacuggaaaauagcagagcaguggauuuugugaggug

SEQ ID NO: 54319 - RNA, 107 nt, Homo sapiens
cacccgaugcccccuuagacuguuguaaugcacagcuggucauuuaagagcccugagaaguccuuggaucauggaguauuugcaagucuaacgggaggcacuuggug

SEQ ID NO: 54320 - RNA, 76 nt, Homo sapiens
acuuaguaguaucuuaggccuucaguggaaggaaacagcauguuccacgcccuguagcauccaagaagcugcaagu

SEQ ID NO: 54321 - RNA, 62 nt, Homo sapiens
acuucauagcaaagagcauaaaagucaucagucagugacuagguaugcuauuuauuagaagu

SEQ ID NO: 54322 - RNA, 56 nt, Homo sapiens
agaucuggaagccacuguuucgaaggcaggucagucuuuugaauaguguccaaucu

SEQ ID NO: 54323 - RNA, 100 nt, Homo sapiens
agaugcuuuucaaaauagaggucaucuucuuggagauuucuucuuaaugguaacuucuaaagauguuaaaagcuaucuccaaggucaucucagggcaucu

SEQ ID NO: 54324 - RNA, 76 nt, Homo sapiens
agaggaaucaucacacugucuuucagaaugguugaacuaguuuacauucccaccaacaguguaaagguguuccuuu

SEQ ID NO: 54325 - RNA, 76 nt, Homo sapiens
agagggaaauaugucuguuuagucuguaaugaugcauauuuucauacauaaaauaaauaggucaucaaaucucucu

SEQ ID NO: 54326 - RNA, 73 nt, Homo sapiens
agagguaagcaguggcaagugcugggcccagaaccaacacuugguugucagcugcuuaguccaaguauccucu

SEQ ID NO: 54327 - RNA, 56 nt, Homo sapiens
agagguuuuggggcugagagcuuggugggcacgggcugccagcugucccggcuucu

SEQ ID NO: 54328 - RNA, 58 nt, Homo sapiens
agagucuaguauuaaaaucacacuguguaguuuaauuccacuuuaaugcuaggacucu

SEQ ID NO: 54329 - RNA, 85 nt, Homo sapiens
agagcaauauuuuuggugcaggagcugacucaucagauuagcagccucucaagauugaugauguuucugccuugccuauuccucu

SEQ ID NO: 54330 - RNA, 84 nt, Homo sapiens
agagcacuccuucaacaggucaauugcauagaaucccugucuugggcucugcuucuagggcaguugaucugaaacaguagcuuu

SEQ ID NO: 54331 - RNA, 61 nt, Homo sapiens
acuguaaggcauuucucagacuccagccagaaacugacacaaauggcaagugccauacggu

SEQ ID NO: 54332 - RNA, 65 nt, Homo sapiens
acuggauguuagggauuuuauuguaucacuuccaaaauguauauguugaaguccuaaccuccagu

SEQ ID NO: 54333 - RNA, 58 nt, Homo sapiens
acuggcauggcaccauagugagaggaaggggguucuuucuugggcaugcuaugucagu

SEQ ID NO: 54334 - RNA, 64 nt, Homo sapiens
acuugggucuggaaggucgaugcugcagugagccaugauugcgccauugcauuccagccugggu

SEQ ID NO: 54335 - RNA, 79 nt, Homo sapiens
acuugguaccuuuuaaugacuaauuaauauaguggacucauuaaauagguggacauuaauaggguacuuaauguggagu

SEQ ID NO: 54336 - RNA, 88 nt, Homo sapiens
acuuggucaucaauuacugagagaggaauauugaaaucuguuacuguaauuguggauuugucuguuucuccuuguaguucuaucaggu

SEQ ID NO: 54337 - RNA, 96 nt, Homo sapiens
acuuugauuaucauagauuuguaauauguuuugaaaucaggaaauguaaguccuccaacuuuguucuuuuucaaaauuguuuugacuauucggagu

SEQ ID NO: 54338 - RNA, 65 nt, Homo sapiens
acuuuguugaaaugaauuaaguguagagucuuguaccacuucaccuucauucauucagcugaagu

SEQ ID NO: 54339 - RNA, 69 nt, Homo sapiens
acuuuuuguggaagauaguguguuaaugugacaaaaauuacaaauguacuuuucuuuccauccaaaagu

SEQ ID NO: 54340 - RNA, 70 nt, Homo sapiens
agaaagaauacaagcaggaaaugguauauguaguagucuuauuuuucuuuccuaguuuguuuaaauuucu

SEQ ID NO: 54341 - RNA, 129 nt, Homo sapiens
agaaauaaacaguaaguacaaguuaaugguugucuugagagaggacaugacugaggagaaauacacaaguauuaguuaaggucuguuucuuaagaugaguaguggaccuauauugucuguuuuaguuuu

SEQ ID NO: 54342 - RNA, 59 nt, Homo sapiens
agaaaucuauguuuugguuagauguauuuuuucaucuuuuauagaauauaggucauucu

SEQ ID NO: 54343 - RNA, 85 nt, Homo sapiens
agaaaugaguuuaaaugguagucguuucaguuaagaucuaagaaagacuuugggaaugaguuuaucauuuauuauaauuauuuuu

SEQ ID NO: 54344 - RNA, 61 nt, Homo sapiens
agaaauuaaacggcucugcugugcucuuccaaucuauugagaacagcugguuuugguuucu

SEQ ID NO: 54345 - RNA, 70 nt, Homo sapiens
agaacacuaguauuccuuuugcauuuccacauagcuauagagugagaagauaaggggauaauggcguuuu

SEQ ID NO: 54346 - RNA, 130 nt, Homo sapiens
acugcaaccuuccccuccugguucaagcacgucuucugucucagccucuccaguagcugugacuacucagaggcuacucagaaggcugaggcaggagaauugcuugaaucugggagguggagguugcagu

SEQ ID NO: 54347 - RNA, 109 nt, Homo sapiens
acuaguagugggauugcugggucaaaugguaguucuauuuuaaguucuuugagcaaucuucaaacugcuuuccaugguggcugaauugauuuacguucccaccaacagu

SEQ ID NO: 54348 - RNA, 86 nt, Homo sapiens
acuagugaguuuguuuaccugauuuguggccaauuugagucugauuaagaaucuuaaaguguuugcagacaggugguaaaauuggu

SEQ ID NO: 54349 - RNA, 59 nt, Homo sapiens
acucaaauagcaacggugagaagcucaggcugccauuaauuucacugugugucuugggu

SEQ ID NO: 54350 - RNA, 86 nt, Homo sapiens
acucagcagucaggggagauggcaaugcgaugaugacugagugucuuagucuuuuuuguauugcuaugcaauaucugaggcugggu

SEQ ID NO: 54351 - RNA, 86 nt, Homo sapiens
acucagcagucaggggagauggcaaugcgauggugacugagugucuuagucuuuuuuguauugcuaugcaauaucugaggcugggu

SEQ ID NO: 54352 - RNA, 70 nt, Homo sapiens
acucagggugaugguugaaugaauuaugggacauuugucucauggaauacuucacagccacuaaaagagu

SEQ ID NO: 54353 - RNA, 59 nt, Homo sapiens
acuccauuuggaacagauguccugcccuucaucucuccagggccuuggccagauggggu

SEQ ID NO: 54354 - RNA, 130 nt, Homo sapiens
acuccuggccucaaguaauccaccugccuuggccuccgaaagugcugggauuggcugggcgugauggcucacgccugcaaucccaauacuuugggaggccgaggcggguggauugcuugaggcuaggagu

SEQ ID NO: 54355 - RNA, 98 nt, Homo sapiens
acucgaaauuaaacauggugcuugccuuucaagaggcuuucaggccaacaagguuuggacuucucaaggcaauaaaugcauugucuuuaaucaagagu

SEQ ID NO: 54356 - RNA, 55 nt, Homo sapiens
acucuaacacugagcaaagaaaauuagaauauuuucaugucuuggcuguuagagu

SEQ ID NO: 54357 - RNA, 66 nt, Homo sapiens
acucuuugugaggagugaacuauuucugauucccuuuuagucaaagguauagcuuuucaagagggu

SEQ ID NO: 54358 - RNA, 70 nt, Homo sapiens
acugagacugagaauguuucuugggucauagauucccauugucagcuuacagcauucuuagugucucagu

SEQ ID NO: 54359 - RNA, 61 nt, Homo sapiens
acugagaucuuuaaauaaauaaauggaauauauaccauggucauggguuggaagacucagu

SEQ ID NO: 54360 - RNA, 61 nt, Homo sapiens
acugaguguugauuuagauuaacuuguugauaauuucuagaugggucagucaggacucagu

SEQ ID NO: 54361 - RNA, 102 nt, Homo sapiens
agaaggggaagaaagagaagcaggauaggguauccuuaacaauacuuaaguuuguaaagaucauaugcuguucuauuuacaauucuuacuuuaugaacuucu

SEQ ID NO: 54362 - RNA, 111 nt, Homo sapiens
agaaggugccauuuaggaauuuuauaacuaaagagaagucaaugucuggguucaaagcuucaaaggacaggcugacucucuuuuuagugguuaaugccgguggugacuuuu

SEQ ID NO: 54363 - RNA, 73 nt, Homo sapiens
agaagugaaauacuuaauuucuccaugcugguuacacugcaccaggaccagggccaauugguacuuuccuuuu

SEQ ID NO: 54364 - RNA, 70 nt, Homo sapiens
agaaucuauauacuguuucucaccuugguggcuccaaucuacauuuccaccaacaguguguaaggguucu

SEQ ID NO: 54365 - RNA, 88 nt, Homo sapiens
agaaugguauaguauaauauucuuugaacaguuuuccugugcauaguaaaauaccuauggaagaauugucggggaugugcuccauucu

SEQ ID NO: 54366 - RNA, 85 nt, Homo sapiens
agaauucagaaauaauucuacugaguguuauuuguucaauaguaauaaaacuguuuguauaggcucaguaagaaucuguccuucu

SEQ ID NO: 54367 - RNA, 76 nt, Homo sapiens
agaauucagcaguauuucuccuacucacacauccgucuauaggcuuucugugagaagaaaaauauggcuguauucu

SEQ ID NO: 54368 - RNA, 123 nt, Homo sapiens
agaauuugcuaggccaugagggcucuacucucaugaaugaauuaaugucguuauuuccagaaugaauuaguugucgugagagugguuccauuauaaaaguaagcucucugguguacaccuucu

SEQ ID NO: 54369 - RNA, 83 nt, Homo sapiens
agaauuuuaugucaguguuuggaaucucaauuucuuaguaaaaacacuauuagaaauuagagacagauagugaaauauuuuuu

SEQ ID NO: 54370 - RNA, 67 nt, Homo sapiens
agaauuuuucagggccucagaguaggguggugugggcuacccuggauucguggccuugaauuguuuu

SEQ ID NO: 54371 - RNA, 69 nt, Homo sapiens
agacacauuccaagcauuacaaugugaugcuacuccaucacauuguuauguaaauguuuugaaguguuu

SEQ ID NO: 54372 - RNA, 65 nt, Homo sapiens
agacagggucuugaucagagcucacugcaauaucaaacuccuggguucaagugauccuccugucu

SEQ ID NO: 54373 - RNA, 77 nt, Homo sapiens
agacucaggaaaauauaguaguugucuucaucugaauggcuaucaugaggaagacugaaauugcuguuccucagucu

SEQ ID NO: 54374 - RNA, 92 nt, Homo sapiens
agacuggagacccagggaagagcugauuuuguugcaguucaaguaugaaguuaaucuuccaacagaauccucuuuuccugggaguauagucu

SEQ ID NO: 54375 - RNA, 83 nt, Homo sapiens
agagauguggcaccuacucauuuuucagcucacuauccauuacaacagggcgugguguuagaaugagaaguuugcauguuucu

SEQ ID NO: 54376 - RNA, 67 nt, Homo sapiens
agagauuauccuggcuucucugugugcacuaaaucuaaucugagcccugaaaagcaggauauuuucu

SEQ ID NO: 54377 - RNA, 64 nt, Homo sapiens
agcugagaucucuugccugaacuccagaguuauacauucaacugcaguuggguaugucucaguu

SEQ ID NO: 54378 - RNA, 99 nt, Homo sapiens
agcugagccuucucuuuggaaaccuuguagccacagguggcgaggaaauuuaagagugcuuggguggcuugauggcacaagguuucugaacaggcagcu

SEQ ID NO: 54379 - RNA, 99 nt, Homo sapiens
agcugagccuuugguuuggaaaccuuguagccacagguggcaaggaaguuuaagagcgcuuggguggcuugauggcacaagguuucugaacaggcggcu

SEQ ID NO: 54380 - RNA, 67 nt, Homo sapiens
agcugaucgcuuuuauguuuaauuuuguuaauaggauuuucuguacacaguaaacuaaaagcuagcu

SEQ ID NO: 54381 - RNA, 79 nt, Homo sapiens
agcugcaggugcauuguuuagaaacacuggguucugagaguuccagcccugcugauuuugagauaauguauugccagcu

SEQ ID NO: 54382 - RNA, 55 nt, Homo sapiens
agcuggcuguagcugcaagucuuauuguccaggagaaacugcagcuguagcagcu

SEQ ID NO: 54383 - RNA, 60 nt, Homo sapiens
agcugggccccagccagcuaugugauuuugcccaggucauacaguauggagggcccagcu

SEQ ID NO: 54384 - RNA, 90 nt, Homo sapiens
agcuagcaugauguuauagagguauuaacaguagaagaauuuauuagcaguaaucucuguguauggucccuuucugauguaaugcuagcu

SEQ ID NO: 54385 - RNA, 130 nt, Homo sapiens
agcuaucauggcauuccugggauaacuuguucauauugugcugucuuugugaugugcuguuggauuuguuagcugguauuuugucgaggacuuuuguaucuauguucaucagggauauuggccuguaguu

SEQ ID NO: 54386 - RNA, 59 nt, Homo sapiens
agcuauugucagcaggcacaugagucaguuaaauaauuuaaagcuuagcuauaguggcu

SEQ ID NO: 54387 - RNA, 70 nt, Homo sapiens
agcuguuguuuuaagauacuaaguuugugguaauuuguuacacagcaauagaaaauuaauacagcaugcu

SEQ ID NO: 54388 - RNA, 66 nt, Homo sapiens
aggaaauccaguuuggaggcuugauguggguuuugaccuggccucagccuuggggcuguuuuuccu

SEQ ID NO: 54389 - RNA, 60 nt, Homo sapiens
aggaaauguuuagcauccacuuuuaaaagcaugaggagaggggagagcuaagcaauuccu

SEQ ID NO: 54390 - RNA, 62 nt, Homo sapiens
aggaacacuuacauacuguuagugggaguguaaccauuguggaagacaguguggugauuccu

SEQ ID NO: 54391 - RNA, 65 nt, Homo sapiens
aggaagauaauuucagaaaagugauacgaacgugauaucaaaguuucccagaaguugucuauccu

SEQ ID NO: 54392 - RNA, 67 nt, Homo sapiens
aggaagucucucaaaacuggaagggaaagguguuuucuccacaucaauccaguuuuggagacauucu

SEQ ID NO: 54393 - RNA, 63 nt, Homo sapiens
aggaaguuagcaugacuuuccuugguuuaaaagacagacucaggaagguaaacuaacuugccu

SEQ ID NO: 54394 - RNA, 127 nt, Homo sapiens
aggaaguucuuuuguauuaauauuauuaauuuucugagugcuuugauuauaaaaggguguuugauuuugucaagugccuuuuugugugucaauugaaguuauuauguguuuuguuucccuucuuucu

SEQ ID NO: 54395 - RNA, 60 nt, Homo sapiens
aggaauagcauugaaucuaccaauugcuuugggcaguauggccauuuuaaugcuauuucu

SEQ ID NO: 54396 - RNA, 72 nt, Homo sapiens
aggaaugcuuauacacuguugaugggaguauaaauuaguucaaccauuuuagaagacagugugaagauuccu

SEQ ID NO: 54397 - RNA, 72 nt, Homo sapiens
aggaaugcuuuuacacuguuggugggaguguaaauuaguucaaccacuguggaagacaguguggcaauuccu

SEQ ID NO: 54398 - RNA, 72 nt, Homo sapiens
aggaaugcuuuuacacuguuggugggaguguaaauuaguucaaccacuguggaagacaguguggcgauuccu

SEQ ID NO: 54399 - RNA, 72 nt, Homo sapiens
aggaaugcuuuuacacuguuggugggaguguaaauuaguucacccauuguggaagacaguguggcgauuccu

SEQ ID NO: 54400 - RNA, 72 nt, Homo sapiens
aggaaugcuuuuacacuguugguggguguguaaauuaguucaacccauguggaagacaguguggcaauuccu

SEQ ID NO: 54401 - RNA, 72 nt, Homo sapiens
aggaaugcuuuuacauuguuagugggaguauaaauuaguugaaccauuguggaagacaguguggcaauuccu

SEQ ID NO: 54402 - RNA, 65 nt, Homo sapiens
aggaaaagagacuggaagaaaaucacgccaucuguaggcaaugggugguuuuucucuuccuuccu

SEQ ID NO: 54403 - RNA, 80 nt, Homo sapiens
aggagaaugauaugauugugauguuugaguggcaccagaccuuugguuuacuguagugucauaucguaucucagucuucu

SEQ ID NO: 54404 - RNA, 70 nt, Homo sapiens
aggagagggcaagagaccugagugucauucuguuauucaggagacaaaacucugguccuuucuuuuuccu

SEQ ID NO: 54405 - RNA, 93 nt, Homo sapiens
aggagaguaugaugugugaaaggugaaagauuaaaccagugugucuuacugacagauugcaagauuuuuuaucaaucagcauguauuacuucu

SEQ ID NO: 54406 - RNA, 68 nt, Homo sapiens
aggaggaacucagauacuggugacaugaauguguugugcuuauucugugcuccaugucucaaccuccu

SEQ ID NO: 54407 - RNA, 57 nt, Homo sapiens
aggaggaaggggaggaugguuaacuggaagcaacuauuuguccugccuuuuccuccu

SEQ ID NO: 54408 - RNA, 65 nt, Homo sapiens
agcacuucuucagccaacuucuaagaaugcacaaguagcuuccauggaauuaauggagagguguu

SEQ ID NO: 54409 - RNA, 73 nt, Homo sapiens
agcccccagcacauuacaaguacuugguaggcacccaaaauuuauuaaauaucuguaauuuguugauaagguu

SEQ ID NO: 54410 - RNA, 115 nt, Homo sapiens
agcccgcggcuucccuccugcucgcuacuugacacuuugguucaccugaguuucccucgcagagccuggagcugguggccagagagcagaggugggugggcugccacugugggcu

SEQ ID NO: 54411 - RNA, 94 nt, Homo sapiens
agcaggugucugagugagggacagcuaccucgaagcuggcucucaaagagcacaaacuugaaagcuaucucaaaucgcuauuuuggcaucugcu

SEQ ID NO: 54412 - RNA, 129 nt, Homo sapiens
agcauaagccaucuuucucaucuacuuaaugucuagaccuggcaauaaauuuuuguguuguuguuuccaaaguuaaaugaucaaagaucaaaacuuuguugccaucaaagauauuuagaagauugugcu

SEQ ID NO: 54413 - RNA, 55 nt, Homo sapiens
agcauggcauuccuguaaagauucuuaugaggagaguccauuugcugccauugcu

SEQ ID NO: 54414 - RNA, 56 nt, Homo sapiens
agcauuaguugugaagccuuuauuacauguauugaaguuuucauacagacuaugcu

SEQ ID NO: 54415 - RNA, 74 nt, Homo sapiens
agcauuucauaucauuagaucuacuguauggagacaccugugcaauugaucaaauguauaugaacaaggaugcu

SEQ ID NO: 54416 - RNA, 66 nt, Homo sapiens
agcauuuggguuuuacaucaggcuaaggaaaaucuuccauaucccagauuaaaaaucuagguugcu

SEQ ID NO: 54417 - RNA, 57 nt, Homo sapiens
agccacgaccuucuugggagcagugaggaaucuagccugacuccagaguugugugcu

SEQ ID NO: 54418 - RNA, 81 nt, Homo sapiens
agccagaauuacugcaguaaccacuguaggugugugugguguggcuuuagacacuuauuugugguaguguuuauuuugguu

SEQ ID NO: 54419 - RNA, 74 nt, Homo sapiens
agccuuaaguagugugcauguauguaugugcacacguguacauguaugccuguuugcgcauugagagcuaggcu

SEQ ID NO: 54420 - RNA, 72 nt, Homo sapiens
agccuuuccaaauacuaaagugcuuaaaaucucauuuauucucugauaaaagaauuugcacuuugggaggcu

SEQ ID NO: 54421 - RNA, 59 nt, Homo sapiens
auaaagccaugagcuugagaugguguacuugaaaggaccguuucaagaucagguuuuau

SEQ ID NO: 54422 - RNA, 66 nt, Homo sapiens
auaaaugucuucuuuugagaagugucuguucauauacuucacccacuuuuugaugaggucguuugu

SEQ ID NO: 54423 - RNA, 60 nt, Homo sapiens
auaacguuuuuguuaauggcacaaaacaguucauuauugcuuuugacagaaacuuguugu

SEQ ID NO: 54424 - RNA, 72 nt, Homo sapiens
auaagaugagcagacuguaucaaugucaguauugugguugugauacuguacugcaguucugcaaaauguuau

SEQ ID NO: 54425 - RNA, 82 nt, Homo sapiens
auaauauuccauugucuagauguaacacaguuuauccauucaccuaaggacaugcuguuugcauccagguuuuggcaauuau

SEQ ID NO: 54426 - RNA, 85 nt, Homo sapiens
auaaucccauagacacugcauauuuuuuuaaguccugaucuucacaguagagcuuaaagaaaguguaguauuguaauguaauuau

SEQ ID NO: 54427 - RNA, 56 nt, Homo sapiens
auaaucccuuuguccagucucuuuucucuggaaaaguugcuaugaaaagggaauau

SEQ ID NO: 54428 - RNA, 55 nt, Homo sapiens
auacagaggggugaaaguucacagguuauucugugaacagucaucucucuuguau

SEQ ID NO: 54429 - RNA, 72 nt, Homo sapiens
auacuauuagguuggugcaagaauuauugcuguuuuuguaucacaguuacuuuugcaccauccuaauaguau

SEQ ID NO: 54430 - RNA, 78 nt, Homo sapiens
auacuuguugagagaaaaaauuuauugguaaaacuaucucaaagcuuaucaaugaaauuauucuuucauuuugggugu

SEQ ID NO: 54431 - RNA, 66 nt, Homo sapiens
auagaugacaguuaggaagcugguggagcuuuaaugcuugcuuugcuuuguugauggugagucugu

SEQ ID NO: 54432 - RNA, 64 nt, Homo sapiens
auagauguagauuuacuuccugugacuuugcagauagaguacaggcaaguuagucaucauuuau

SEQ ID NO: 54433 - RNA, 56 nt, Homo sapiens
auagcagaagaagggacaauucacauucucuuguagggauguccaucuucuccugu

SEQ ID NO: 54434 - RNA, 120 nt, Homo sapiens
auagcagaauugugcuuacaauaagcauguacaguauaguaauaggauuugggugacuaaauuuaccauuuugcugucauugccaaugcuuuugguugugaaaauuuauaaaauugcuau

SEQ ID NO: 54435 - RNA, 65 nt, Homo sapiens
auaggaaguuucuugauuacuuauucaaucuuuuuacuuuuaauaggucuaaggagacuuucugu

SEQ ID NO: 54436 - RNA, 56 nt, Homo sapiens
auaguaaacauaguucuuuugcucuaaaucuagagcaauuguggguauguuucugu

SEQ ID NO: 54437 - RNA, 56 nt, Homo sapiens
auauagacacugaaaucccugccaacccaguuugcaugacaauuucaggucugugu

SEQ ID NO: 54438 - RNA, 57 nt, Homo sapiens
auauagacugcacguaagucacagguuauugguccuggaaaguacuugaguuuguau

SEQ ID NO: 54439 - RNA, 82 nt, Homo sapiens
auauauauauauguacacauacauauauguguguguauauauauauauacacacguaugugugugugugugugugugugugu

SEQ ID NO: 54440 - RNA, 112 nt, Homo sapiens
auauauugcuuuacaaggauuaugugaggauaaaugcaaugguauuuuugacauauuauaguacucaagaaauuguaguuauuucugcauugaauuuuuggauguuuugugu

SEQ ID NO: 54441 - RNA, 110 nt, Homo sapiens
auaucacggggggauguacaccaccugagauauugggaguaaugucaggcucucccuuuccuggauauuacgaacaauaucacagcguggguguacaccuccugcuauau

SEQ ID NO: 54442 - RNA, 61 nt, Homo sapiens
auaucaguauggauucauggauuccucuuguauucaaugaguuauaaucugcuacugauau

SEQ ID NO: 54443 - RNA, 74 nt, Homo sapiens
auaucagugauggcacugccuggcuucauggcacccugccgugcugcaugaagacaggcugugccuucuggugu

SEQ ID NO: 54444 - RNA, 81 nt, Homo sapiens
auaucaguuccuuucauuucaaacauuugcuugacauuuguaguaauuaggugaaugcuggaagaaaugauuaaaugauau

SEQ ID NO: 54445 - RNA, 84 nt, Homo sapiens
auauccuuugcccauuuuuaaugggguuguuuguuuuuguguguguauauaaauucauuuaagcuccuuauagaugauggauau

SEQ ID NO: 54446 - RNA, 63 nt, Homo sapiens
auaucugcauugccauuuaugugggauaaagcuuguuuacccuuaaagguauuguguaggugu

SEQ ID NO: 54447 - RNA, 104 nt, Homo sapiens
auaugaacacagguaugcacaugcaugcuugaauaucugagugcauacaugcuuggauaucuaugaauguaugugcaugaaucaagucucuucugugugcaugu

SEQ ID NO: 54448 - RNA, 62 nt, Homo sapiens
auaugucuggcagaagacuucucaguggaaaccucauaugcugagagaguggcaugacauau

SEQ ID NO: 54449 - RNA, 86 nt, Homo sapiens
auauguucuaauccucuaauguaaccugcaaauauuaccuuacuuggaaaaagagucuuugcagaugcaguaaaguaagaauguau

SEQ ID NO: 54450 - RNA, 76 nt, Homo sapiens
auauugaaggaggugcucacucucggaugcugaugcuacacuugccaacccugagagugagcaucuccuuaaaugu

SEQ ID NO: 54451 - RNA, 77 nt, Homo sapiens
auauuuucagguaaaaaguagaaugaagcauucucagaaacuucuuugagaugugugcauucaacucacagagaugu

SEQ ID NO: 54452 - RNA, 68 nt, Homo sapiens
auauuuugauuuacuuccaugucucauaauauugugccagagucagguuggaaaguaagucaugauau

SEQ ID NO: 54453 - RNA, 81 nt, Homo sapiens
aucaaaugaaagguuuaauucugugagaugaaugcacacauuagaaaguaguuucacagauaaauucuuucuagguuugau

SEQ ID NO: 54454 - RNA, 77 nt, Homo sapiens
aucaccacccuaucagauguccagagauccauuugccuuuuugcggucuuaugaacaguuguauggggaguggugau

SEQ ID NO: 54455 - RNA, 101 nt, Homo sapiens
aguuauuuaaggcaaacagcugaaauugcacaaguggugauuugguuaauucugccaguugaguaaguaauugugacacauuucauaguuugcuuaugauu

SEQ ID NO: 54456 - RNA, 63 nt, Homo sapiens
agugugaacagaaccugggaucgaagucacuccugugauuaggugacuaauucuguucacauu

SEQ ID NO: 54457 - RNA, 128 nt, Homo sapiens
agugugauaaauaagaaaaaacaugggccuguaagacacagugacaugggaucaaaucugauuguggcuacaauuacugguuaauuuccaguuacugcucccaaccccuccauuccauucucuacacu

SEQ ID NO: 54458 - RNA, 75 nt, Homo sapiens
aguucguacccuuaagcacuaguucagcuguucucaaacuuaaauacgcauaauaauagcuuaggggaacugauu

SEQ ID NO: 54459 - RNA, 82 nt, Homo sapiens
aguucuaggguacaugugcacaaugugcagguuuguuacauauguauacaugcgccauguuggugugcugcacccuuuaacu

SEQ ID NO: 54460 - RNA, 67 nt, Homo sapiens
aguugaucucauuggcuacugaggcuuguggauucaucacguaguucucaugccaugguuuucagcu

SEQ ID NO: 54461 - RNA, 60 nt, Homo sapiens
aguuguagcaagacuggauggcugaugaccuagauucuggccccaguuuuucuauuagcu

SEQ ID NO: 54462 - RNA, 82 nt, Homo sapiens
aguuguaggguacaugugcacaacgugcagguuuguuacauauguauacaugcgauauguuggugugcugcacccauuaacu

SEQ ID NO: 54463 - RNA, 82 nt, Homo sapiens
aguuuuagggcacaugugcacaacgugcagguuuguuacauauguaugcauaugccauguuggugugcuguacccauuaacu

SEQ ID NO: 54464 - RNA, 82 nt, Homo sapiens
aguuuuaggguacaugugcacaacgugcaaguuuguuacauauguauacgugugccauguuggugugcugcacccauuaacu

SEQ ID NO: 54465 - RNA, 82 nt, Homo sapiens
aguuuuaggguacaugugcacaacgugcagguuuguuacauauguauacaugcgccauguuggugugcugcacccauuaacu

SEQ ID NO: 54466 - RNA, 61 nt, Homo sapiens
aguuuuugaaugaacauugcuaugugguuauaaacugauggcaauggcauucauuuuaacu

SEQ ID NO: 54467 - RNA, 65 nt, Homo sapiens
aguggcugagauuuauugagcaacuacuauaugcuaaggguuguaugcuuauugucucauccacu

SEQ ID NO: 54468 - RNA, 67 nt, Homo sapiens
aguggggaaauaucaauauuugaucaaauuaacacuaccuccuucccaguguugguguucacucacu

SEQ ID NO: 54469 - RNA, 81 nt, Homo sapiens
aggugugaggugauaucucauugugguuuuaauuugcauuucacagaugauuaaugaugaugaguauuucuucauguaccu

SEQ ID NO: 54470 - RNA, 63 nt, Homo sapiens
agguuacagugaaaagauggcugucugugaaccaggaaacagaccucacuagacacugaaucu

SEQ ID NO: 54471 - RNA, 75 nt, Homo sapiens
agugguacugaggaguagggcacaaagccuugggcauagcugucaaggcuuuagcagcccaccccuuguaccacu

SEQ ID NO: 54472 - RNA, 109 nt, Homo sapiens
aggucugggucuuuuccuguggagaguuaagcuuuuagguccuccucaccugaggccccgggcugacggaggcauuggaagcuuguaaaagucagggcugagaugaccu

SEQ ID NO: 54473 - RNA, 91 nt, Homo sapiens
agugaaugcaguggaggauaagggaagcagcuuuuauugaucuuguuauuuauaugaaaacaugauuugccuguuuaccacaguguucauu

SEQ ID NO: 54474 - RNA, 101 nt, Homo sapiens
agugagagguauggcagaagaggugaggagucagacugugcaaggucuuagaggacuuuuagggauuuuggucauuugccuaucugcaaugggaaguuacu

SEQ ID NO: 54475 - RNA, 56 nt, Homo sapiens
agugcauuugcaucucaauauaaagucacugcaugauauaccaaugcggaugcacu

SEQ ID NO: 54476 - RNA, 84 nt, Homo sapiens
agugccugauacacgguaggcacauauuuauuuguucagccauuuaacaaacauuuagggagcaccugcugugugccaggcacu

SEQ ID NO: 54477 - RNA, 128 nt, Homo sapiens
agugcucuauuuuuuaaaaccuguacugacucauuuaauuaucauggcaagccuaugaaauagcuacuauuauuaucacaguuuugcauauggguaaaugaaggcacaaaagggaaaaauagcuugcu

SEQ ID NO: 54478 - RNA, 73 nt, Homo sapiens
agguacuuagugaauguuggcuauuaauacuauuacuauauaugcaguguuacuaauaauucauucaguacuu

SEQ ID NO: 54479 - RNA, 55 nt, Homo sapiens
agguauuuagucuuguguccuauccuuucuuuuuaggauaguagauuaaauauuu

SEQ ID NO: 54480 - RNA, 103 nt, Homo sapiens
aggucagcuggucuucagcuugacccuagaauugacucuaggagcagugacccugcugccucccagagccaguuauaggcucaagaucaagaccaacugaccu

SEQ ID NO: 54481 - RNA, 66 nt, Homo sapiens
agggcuugcacuugaaauuccaguuuguagcuccacagugaaagcuauggguuucaagugggcccu

SEQ ID NO: 54482 - RNA, 85 nt, Homo sapiens
agggugguuuugccaaacaaaggugcaguuggaugaaaaaccaguguaaauauuugcacauuuuuucuggcagaaauccuacucu

SEQ ID NO: 54483 - RNA, 77 nt, Homo sapiens
aggguucaauaaauaguaguugugguggccauucuuacuagguuugguugcaggcaagugcuauucugcuggucccu

SEQ ID NO: 54484 - RNA, 62 nt, Homo sapiens
aggguuccuaacuuucuauaguuaugaacuuuuuugguuaucuaaggaaagcuaugaacccu

SEQ ID NO: 54485 - RNA, 79 nt, Homo sapiens
agguuggagugcaauggugaguucucagcuuauugcaaccuuccccucccagguucaagcaauucuccugccucagccu

SEQ ID NO: 54486 - RNA, 86 nt, Homo sapiens
aguaauaggaccaaaugaucacauuuauaguggcacgcauaguaguuuaugaguggcaguauaugugugaguguuuccuuugugcu

SEQ ID NO: 54487 - RNA, 84 nt, Homo sapiens
aguacauuguaauuugaucacauuguuucauacauauucugggacauccuaaaauuguacaugcagugagucaucuuacgugcu

SEQ ID NO: 54488 - RNA, 82 nt, Homo sapiens
aguagaagaugaauacaaagcuuucugcaaaucauuuucaaaggaaagugaugacccuguggcuuguauucacuuuacugcu

SEQ ID NO: 54489 - RNA, 55 nt, Homo sapiens
aguagagguaggucuucgagucucagggacaucccuggccugcccaaugucugcu

SEQ ID NO: 54490 - RNA, 129 nt, Homo sapiens
aguagccaucucaguuaucagacuguuguggcauaaaagcgcuuguguucuuguauccuuuauuuuacuuaauaauggcaccaaagcacaagagcaguuaugcuggaauacuguuauaauuguucuauu

SEQ ID NO: 54491 - RNA, 90 nt, Homo sapiens
aguagcuauauauaaacacauacacacauguguauaugugugugcacgcauguaugcacauauguguauguauuuguguguauaucuauu

SEQ ID NO: 54492 - RNA, 65 nt, Homo sapiens
aguaggcuuagcugucaagggcauucccaucaacaaagcccuguugacagaaaauugaguuugcu

SEQ ID NO: 54493 - RNA, 80 nt, Homo sapiens
aguauaaauaaaggugcuguaagcauccauguggagggcuuuauguggacauauguuuucagcuccuuuagguaaauacu

SEQ ID NO: 54494 - RNA, 61 nt, Homo sapiens
agucaaaaaagaagcuauuauuaaauggaauaacauaguaauaaagcagcuuuuugggacu

SEQ ID NO: 54495 - RNA, 94 nt, Homo sapiens
agucaaacuugagguuuauggaggagguaggaauugugcuaggacugaagcauuuggaccugggcucaaguccugccuccuucucauaauggcu

SEQ ID NO: 54496 - RNA, 80 nt, Homo sapiens
agucacagauuaaugugucaaauuaauguauuuguguugguuaauauaaaugcuucuauguggcauguuuagucaagacu

SEQ ID NO: 54497 - RNA, 72 nt, Homo sapiens
agucauuaagaguacaaaauguagauucagacuaccuggguucaaaucuuggcucuuacuugcauuguggcu

SEQ ID NO: 54498 - RNA, 57 nt, Homo sapiens
agucauuauguuuugggcgauuuguuaugcagcaauagagaacugaaacaugugacu

SEQ ID NO: 54499 - RNA, 60 nt, Homo sapiens
agucuccaccucuggggcucaagcgauucucccaccucauccucccuaguagcugggacu

SEQ ID NO: 54500 - RNA, 130 nt, Homo sapiens
agucuccaugacugugagccaauuaauuucuguuuauauuaguccauucucaugcugcuaugaagaaauucuugagacugguuaauugauaaagaaaacagguuuaauugacucacaguuccauaugacu

SEQ ID NO: 54501 - RNA, 112 nt, Homo sapiens
agucucgcucuuugcccaggcuggagugcaauggcuugaucucggcucacugcaacccucugcuuccuggguucaagcaauucuccucucagccucccaaguagcugggacu

SEQ ID NO: 54502 - RNA, 58 nt, Homo sapiens
agucuuagcucuguuuccucagcauuccuagcuaugcagugugcaacagauuaagacu

SEQ ID NO: 54503 - RNA, 67 nt, Homo sapiens
agucuuugccuguuaacauagcauauuaugguaauauggugguauguaugauuaacauggauugacu

SEQ ID NO: 54504 - RNA, 60 nt, Homo sapiens
agucuuuucccauuguucugcucuguggaagucaccuucagaguaauagugggggugacu

SEQ ID NO: 54505 - RNA, 71 nt, Homo sapiens
aggcccuugcucaaaacagaaaauugucaucuuauaugucuuauuacauuuuccuguagggggcaaggccu

SEQ ID NO: 54506 - RNA, 76 nt, Homo sapiens
aggcgaagcuaugaagccagccauaugccauguuauaauuaugaugccguaaaucucuguuuucauggaccugccu

SEQ ID NO: 54507 - RNA, 130 nt, Homo sapiens
aggaucaucuucacuagcugucucagcauugccuuggaggucauugaugugcaacugcuggaacagucauaaacauggcugugcauacaaugccccauuugucaugcucaguuuaucugaaggugguccu

SEQ ID NO: 54508 - RNA, 88 nt, Homo sapiens
aggcacuugcuggcuggcugagugguaaguagaggagugaauggcuccucacacccguccccgccagcccagcccucaguaucugccu

SEQ ID NO: 54509 - RNA, 56 nt, Homo sapiens
aggcagagguugcagugaguggagaucaaucgcgucaugucacugcacucuagccu

SEQ ID NO: 54510 - RNA, 89 nt, Homo sapiens
aggcagucacaggauaauaaagcugaauccuuccugaaugucucuaaaauguucaugguucuuucuagcuuuaugguuggucacugccu

SEQ ID NO: 54511 - RNA, 56 nt, Homo sapiens
aggccaaauagcagguuugcuaaauguuuuaauguuguaaacugcuuccuuggccu

SEQ ID NO: 54512 - RNA, 69 nt, Homo sapiens
aggcuaccuugugagguugauaugaagauuaaauuaauuaauucacauaaagcacuuagaacaaagccu

SEQ ID NO: 54513 - RNA, 79 nt, Homo sapiens
aggcuagagugcagcggcgugaucuugacucacuggaaccuccgccucccagguucaagcaauucugcugccucagccu

SEQ ID NO: 54514 - RNA, 79 nt, Homo sapiens
aggcugaaaugcaguggugugaucuuggcccacuccaaccuccaccucccggguucaagugauucuacugccucagccu

SEQ ID NO: 54515 - RNA, 79 nt, Homo sapiens
aggcugaagugcaguggcaagaucuuggcucacugaaaccgccaucucccagguucaagcaauucuucugccucagccu

SEQ ID NO: 54516 - RNA, 106 nt, Homo sapiens
aggcugaggcagaagaaucgcuugaacccggugggcggagcuugcagugagcugagauagcgccacugcacuccagccuggguggagcgccacugcacucuagccu

SEQ ID NO: 54517 - RNA, 73 nt, Homo sapiens
aggcuggagugcaguggugcgaucuuggcucacugcaaguucugccuccuggguucgcgccauucuccugccu

SEQ ID NO: 54518 - RNA, 79 nt, Homo sapiens
aggcuggagugcaguggugugaucucggcucacugaaagcucugccucccggguucgcgccauucuccugccucagccu

SEQ ID NO: 54519 - RNA, 56 nt, Homo sapiens
aggcuguagugcaugugcuaugaucaugccugugaauaaucauugcacucuagccu

SEQ ID NO: 54520 - RNA, 82 nt, Homo sapiens
agggacuuuauucauucuuucacagaagagaaaaagagaaaaauaugucuauuccauuugugaaaggaaguguaacuucccu

SEQ ID NO: 54521 - RNA, 102 nt, Homo sapiens
agggagcucuggcuuagauucuguauuauuuuguguuauacugauuuuuagaaaauggaauguagcguugacacgagcacaaaucucagcaagggccuaccu

SEQ ID NO: 54522 - RNA, 68 nt, Homo sapiens
agggagugagucagucugcuguugcuuacucucggugcuggcugagcucagcaaccugcucucuuccu

SEQ ID NO: 54523 - RNA, 98 nt, Homo sapiens
agggauguaugguauuuauggcuggguaggaccagaaaugcacuuuguauuacagaguguuaaggcugguugcuauaguauggaacagaaacaccucu

SEQ ID NO: 54524 - RNA, 63 nt, Homo sapiens
agggccaugucucugaguaggcaaggagaauagaaucuauugcacaugaggagacauuguccu

SEQ ID NO: 54525 - RNA, 88 nt, Homo sapiens
aaucugagauugucaugauuacauuguuuugggguuaaaguguccaaucaucucccaccauaaaaugauggugacaauaauucagguu

SEQ ID NO: 54526 - RNA, 76 nt, Homo sapiens
aaugagauaaucuggguaaugcauuuagcauauggcuggcaugaaguuaagugcucaguuacucaguuauuauauu

SEQ ID NO: 54527 - RNA, 78 nt, Homo sapiens
aaugauugcuagggagaauuauuggauacaggaacagagauuaucuuguaauuuaaaugauccuuggaguuagucauu

SEQ ID NO: 54528 - RNA, 94 nt, Homo sapiens
aauaucacagaguguacacccacugugauauuaggagaaagcucucccuuggguauuagaauaauaucacaggguguacacucacugugauauu

SEQ ID NO: 54529 - RNA, 102 nt, Homo sapiens
aauauccacuguaagcucugucugaacugagacuagacuuguuccuucauggguggaggaacaaguuuagacucaguugagacauagcuuacaguggauauu

SEQ ID NO: 54530 - RNA, 87 nt, Homo sapiens
aaggugguaguacuacaguagagaggauguagaaauagggcagaaguuguuaagucuugcucugcuguugacuacccaugugaccuu

SEQ ID NO: 54531 - RNA, 75 nt, Homo sapiens
aaucaggacauguuccuuuucaucuuugccucccauaauuuucuuugguagaggucuuaucaaacaugcuugauu

SEQ ID NO: 54532 - RNA, 64 nt, Homo sapiens
aaugccucagugguuucuuuaaaagcauacaguaugcugccuacaagagacucauuguagcauu

SEQ ID NO: 54533 - RNA, 70 nt, Homo sapiens
aaugcuguucauugaugacacugauuucuucaauguucauacauguugaagugugugucagaacuuuauu

SEQ ID NO: 54534 - RNA, 65 nt, Homo sapiens
aauggaaauugauggcuaauaugaaaagaugaaagucugaguucaugaggccauucaaauccauu

SEQ ID NO: 54535 - RNA, 84 nt, Homo sapiens
aauguacacagucaaaaauuuccaggcacaucugcucucuccucuccuauuugacauugcacuggagauucuggcaaguauauu

SEQ ID NO: 54536 - RNA, 63 nt, Homo sapiens
acaaguguuucaguggguacaugcuuccguuucuuguggguaaauacccagaagcagcauugu

SEQ ID NO: 54537 - RNA, 108 nt, Homo sapiens
aauuggauuuagaagucuauggaaauuauuaggaagauggguuuuaagugaccaguuuuuuauacaucuucuuugacagugauuugugcauaagcuucugaaguaguu

SEQ ID NO: 54538 - RNA, 89 nt, Homo sapiens
acaauaaugaauauugcuggaaagugaaugugcuggaauagcuucagagagcuuaucuccauauauuuucuuaauuggcacauuauugu

SEQ ID NO: 54539 - RNA, 68 nt, Homo sapiens
acaaugaaggaaaagggccuagaauuuuauuuugaguacaguaaugggccccuuuuccuauugguugu

SEQ ID NO: 54540 - RNA, 108 nt, Homo sapiens
aauguuuucuuuaggcauagauuggugcauguauuuuaaacagaguuguauuuuauauacuguuuauaaccuguaaccauaugaucaguuuccaugucuuuaaauauu

SEQ ID NO: 54541 - RNA, 118 nt, Homo sapiens
aauucccuauccaucuuccuacacacuuucauagccuuugucgucugagggaaaaagaaagguuuucaucaugccaguuaaaggcugugaaugugaccuagauaauucuuggggaauu

SEQ ID NO: 54542 - RNA, 68 nt, Homo sapiens
aauucuaugagguugguauuacugucucuauuuuaagaucaggggcuuuaagaaacuucccuaggauu

SEQ ID NO: 54543 - RNA, 84 nt, Homo sapiens
aauuuaugagguuccuaaucuccauauguucaguuaugcagugaaauaugauuuguuugcauugcauagacauccucauagauu

SEQ ID NO: 54544 - RNA, 93 nt, Homo sapiens
aauuugaaauauuaacugggcauggugguacacaucuguagucucagcuacucaggaggcugagaugugaagaucacaugaacccagcagauu

SEQ ID NO: 54545 - RNA, 93 nt, Homo sapiens
aauuugauagucuuugauagcaauaugacauugcuacauccaagugugggagucaguacacuuauauugcgcauaucuuggacauuuuagguu

SEQ ID NO: 54546 - RNA, 68 nt, Homo sapiens
aauuugccuggggucaacuuuuaauugcuggagugagcagcacuucacauuguacaaacagguaaguu

SEQ ID NO: 54547 - RNA, 125 nt, Homo sapiens
aauuuuagacuuguaucucuuuguaaggacccuuggaaauuaacagggauuguccauacucugagaggaaguggcuucucugucuaguuucuaccacuuauaauuauguuggucuuuuuaaaauu

SEQ ID NO: 54548 - RNA, 99 nt, Homo sapiens
acaaacgguuccuggccuuguaaauaccaguuucuggaacagaguuucugaauuucugucuuagaaauuauguauuuaauaaaugugagaauaauuugu

SEQ ID NO: 54549 - RNA, 64 nt, Homo sapiens
acaggaagaaagugcaguagauucucauuauucacaaguucuaaauuugcaaauucuucccugu

SEQ ID NO: 54550 - RNA, 56 nt, Homo sapiens
acaguauggugguagugacauucaacuauccacauauaucacaaccacagugcugu

SEQ ID NO: 54551 - RNA, 111 nt, Homo sapiens
acagucuugauccuauggguucugaaaaguucuuugagccuugacaagcagacguauugguguuaagaagcccagggaauuggcagaggccugaagaugcacagaggcugu

SEQ ID NO: 54552 - RNA, 68 nt, Homo sapiens
acauagcagguguuccacaaauauugguuaccuuacugauaaccaauguaguugaauauuugcuaugu

SEQ ID NO: 54553 - RNA, 71 nt, Homo sapiens
acauauguuacaaacccauauuauauuguuauuauuuuaguguaaaaaguugauaugguuuggauaugugu

SEQ ID NO: 54554 - RNA, 77 nt, Homo sapiens
acacccuuccauggaguugucuacuauguccaaggaacuagacuggaaaauggaagacuccucuuuggguauggugu

SEQ ID NO: 54555 - RNA, 92 nt, Homo sapiens
acacuauuaaauauuuggaaaauuagcaagaugaauuugugcaaacaguuauauauaguucuguuuguucuuauuuuuuauauauguggugu

SEQ ID NO: 54556 - RNA, 63 nt, Homo sapiens
acacucacauacauacaauguccaauaugggguuucuucuuacaaaguauggaauguuggugu

SEQ ID NO: 54557 - RNA, 78 nt, Homo sapiens
acacuuuggaaauguguuugcauucagugagucuuuugcacuacauuggagaaacugcaaacauacuuucuguugugu

SEQ ID NO: 54558 - RNA, 69 nt, Homo sapiens
acagaaguuugacauguuuagcucuuccaaauauagaguuaaucuagcagcuaaauuggaaauuucugu

SEQ ID NO: 54559 - RNA, 129 nt, Homo sapiens
acagagaacagugagcggagagaaaaagucuccuuaacccagaguuccuugucuuucaccaguggggacuuccaugacuuggcuagacugaggggucuggggugugacuuggcuguuucugcucucugu

SEQ ID NO: 54560 - RNA, 126 nt, Homo sapiens
acagccaguccccaggccugugaagggaggugagcagcacauggcagaacauauugaagaccaaggagucaguggcccucugugugcugcauacggacugccggaggaaggcuugcuggaggcugu

SEQ ID NO: 54561 - RNA, 130 nt, Homo sapiens
acagcuaauaucacaguaaauguacaccauguguguacacccugugauauuaauaauauccuagggaaauauuacuccuaauagcacaguguguguacaccauguguguacagccugugauauuauuugu

SEQ ID NO: 54562 - RNA, 64 nt, Homo sapiens
acaucucaguucaggcuggccacauuucuucaaguugaaauguggcuaacccaaauugagaugu

SEQ ID NO: 54563 - RNA, 60 nt, Homo sapiens
acaucuguacagugggugugguagcucccaugaucuucaggggccacaccacucagaugu

SEQ ID NO: 54564 - RNA, 79 nt, Homo sapiens
acaucuuuuugcaauuugugaauauugugauccagccauguucacaggccauuugggauaaucacaaaguaaaacaugu

SEQ ID NO: 54565 - RNA, 98 nt, Homo sapiens
acaugagacuaggguuguuuggccuguaggguauugguaggggcugcuguggucccuuugcucacccuugggccagcugacuccuucauucucuaugu

SEQ ID NO: 54566 - RNA, 85 nt, Homo sapiens
acauuacugcacgugucuuuuggugaacaaauguagcauuuuuguugaauauguuucuaaaagugcaauugcuaauucaugaugu

SEQ ID NO: 54567 - RNA, 82 nt, Homo sapiens
acauuccuggagguauaauuauaggaucauugacuauuauaaggcugcuaaagcaugaugcuaaauuucuuuucaggagugu

SEQ ID NO: 54568 - RNA, 58 nt, Homo sapiens
acauucugagaaaugugucauuaggugauuuuguccuugugugaacaucacagagugu

SEQ ID NO: 54569 - RNA, 79 nt, Homo sapiens
acauuuuagcaccaaacauauacucagucagcaccagagacugcucacuagagaagaguguuaugugugcugugaaugu

SEQ ID NO: 54570 - RNA, 103 nt, Homo sapiens
accaauaaauugagggcuaggaaagcuguguugugcccagcaucauagacagcacugucuauguguggaauuauaacaggcccaagaucucuaagugauuggu

SEQ ID NO: 54571 - RNA, 74 nt, Homo sapiens
accaauagcugucaguuuuaacuagggaauaucagucuauugauguuuauagauggcugaaggcaguauauggu

SEQ ID NO: 54572 - RNA, 58 nt, Homo sapiens
accaaugucuuugacugaugaacccacaaacaggcauucaucagucaaagacaauggu

SEQ ID NO: 54573 - RNA, 130 nt, Homo sapiens
accacauuuucuuuauccagucuagcauugaugggcauuuagguugauuccaugucuuugcuauugugaauagugcuggaauuaacauagaugugcauguguugauagaacaauuuauauuccuuugggu

SEQ ID NO: 54574 - RNA, 55 nt, Homo sapiens
accacccauucucugaccguggggucuguggcccacacugucuucaauggguggu

SEQ ID NO: 54575 - RNA, 66 nt, Homo sapiens
accacgccuggcuaauuuuuugaaucuuuaguagagacaggcuuucaccguguuggccaggcuggu

SEQ ID NO: 54576 - RNA, 94 nt, Homo sapiens
accccaugacauugauuagcacaucuucuuggccugcaacucauucauaugugcauauuuugucggcccaaugagaguguuagcagaaaggggu

SEQ ID NO: 54577 - RNA, 70 nt, Homo sapiens
accauagguuuucacuguagauucuguggacccccagccuauggauucugucagauggcaaaucuauggu

SEQ ID NO: 54578 - RNA, 88 nt, Homo sapiens
accauaugucacuuuacacuguacuuuaucgugugaguuuuguguuuucacacugaauuugaagcaauguaaggccgacaccuauggu

SEQ ID NO: 54579 - RNA, 122 nt, Homo sapiens
accaucauguaacuaccaaaucaggaaauacaggguuaguauugguaauuguaauggcaaaauauuuauuuacaagcacaaauuuaauccugucacuuuccugauuuaauuuugcuaauggu

SEQ ID NO: 54580 - RNA, 92 nt, Homo sapiens
accauggacuauaacagcugcaaggcaaaagcagcaaauaaucaauggagaaaugccuggcuuuugccuuuggucuuuaucuaggucugggu

SEQ ID NO: 54581 - RNA, 61 nt, Homo sapiens
accauugcaguuuuugguguaucucaucaauuugcugagcauacuucucagacguaauggu

SEQ ID NO: 54582 - RNA, 58 nt, Homo sapiens
acccaggaggcagagguugcagugagcagagauugugccacugcacuccuccuugggu

SEQ ID NO: 54583 - RNA, 61 nt, Homo sapiens
acccaggaggcagagguugcagugagccaagaucacgccacugcacuccagccuccugggu

SEQ ID NO: 54584 - RNA, 90 nt, Homo sapiens
accccacaguccccacccuugcagggacagcuuugucaugcggguagcauaguacauguuugaaggugcccaugaagguuggggaggggu

SEQ ID NO: 54585 - RNA, 60 nt, Homo sapiens
accuaaaaggcuaguuuccaacuagcuccugaaggcuaacuggaaauuaaccuuucaggu

SEQ ID NO: 54586 - RNA, 111 nt, Homo sapiens
accuaggacuuugggacaauaaaagauaaagaugaguuuuagcaaauuuugcugaaucuugcacaauggaauuuaucuuugugaacucuuuuaaaaauucaacuucuaggu

SEQ ID NO: 54587 - RNA, 62 nt, Homo sapiens
accuccucugggccugguguuuguggcaucuguggcaguuugaauaacagccccagggaggu

SEQ ID NO: 54588 - RNA, 56 nt, Homo sapiens
accucugccuaguuuucagaggauguauggaaauaccuggaugucgaggcagaggu

SEQ ID NO: 54589 - RNA, 67 nt, Homo sapiens
accugagguuggguaauuuaugaagagaaaagauuuauuuggcucauaauuacgcuagcugaaaggu

SEQ ID NO: 54590 - RNA, 56 nt, Homo sapiens
acguguaacuucaaaugggaagaucccuuguccuuccugagaauagaguugcaugu

SEQ ID NO: 54591 - RNA, 70 nt, Homo sapiens
acuaauggauuaacgucccugucgugugacauuuucugguaugacagcugaagauguugaaccguauggu

SEQ ID NO: 54592 - RNA, 83 nt, Homo sapiens
acuacauuuaucagacugaugcagcuaggauuugugacaugauuuagauuucaucgaugagcugcauuuucaugaaauguagu

SEQ ID NO: 54593 - RNA, 129 nt, Homo sapiens
accuuggagcucacagcauugucuugguugggggaccaugugggcggcagguccuggcugugcucgcuccccacccugucauccacauggugcucugucgggggccuggggcaugcugcccuccagggu

SEQ ID NO: 54594 - RNA, 84 nt, Homo sapiens
accuuugaauuauucugauuuuugcauggcuuucaagcugaaccuuguaaaugaauaguuugacagaacucuuuaaugaagggu

SEQ ID NO: 54595 - RNA, 61 nt, Homo sapiens
accuucaagaggcauuuuccaaauacuucacuuacucuguuuacaauggcuccuugaaggu

SEQ ID NO: 54596 - RNA, 77 nt, Homo sapiens
accuucuuugaagcagaaagauggugaauaugguaauuuuuauggcuuacuaccagcauuucucuuuaaguaaaggu

SEQ ID NO: 54597 - RNA, 78 nt, Homo sapiens
aaaccauacuguguccuuuauacuguccaaaauuucauucuuccuuauuuucaguguggcaggcauagcuaguuguuu

SEQ ID NO: 54598 - RNA, 122 nt, Homo sapiens
aaaagauguuaaugaauuuuuaguaaucauacaauaggaucucaguuuugccuuguuuaagggagagcaucucuuaaccaguuuagaauuguguuagaaucugaaaauuuugcauuucuuuu

SEQ ID NO: 54599 - RNA, 60 nt, Homo sapiens
aaaaggguaacuaugugagaugauagauauguccauuuauugcacuaugguaacccuuuu

SEQ ID NO: 54600 - RNA, 112 nt, Homo sapiens
aaaaucauaaaaaauaacacucuacugucagucuuuuuuuggcaagcauuaaggguaaguggucuuggggauguauugucaggugaagaauggcauaauuuauuaugauuuu

SEQ ID NO: 54601 - RNA, 65 nt, Homo sapiens
aaaauguuagcacuaagaauauauuuuuauauuuuaacuuaggagcuuucuuguguugauauuuu

SEQ ID NO: 54602 - RNA, 98 nt, Homo sapiens
aaacaaaaauggcauuugaauggaaguuuugugaaaucuguugauucaaagauguuaaucauuuuuaccaugacuuguuuauuuauagccuuuuguuu

SEQ ID NO: 54603 - RNA, 66 nt, Homo sapiens
aaaggcaguguggguagagggcaagaaagucugaucgucuugucuguaaucccaauacuacccuuu

SEQ ID NO: 54604 - RNA, 73 nt, Homo sapiens
aaaggcauugcuuguuuaaagcaguuuaaaugauaguaucuuuuaaggcuuuaaguaaacacagcuggccuuu

SEQ ID NO: 54605 - RNA, 77 nt, Homo sapiens
aaaggcuacuauacugaagcaaauuaacauguuuguaaucucacauaguuacugcuauaguuuggauauuugccuuu

SEQ ID NO: 54606 - RNA, 68 nt, Homo sapiens
aaagggugugcagcuaucucauuguuguuuuaauuuacaauuuccuaaugauauguugagcacccuuu

SEQ ID NO: 54607 - RNA, 57 nt, Homo sapiens
aaagguaguacuucuagaagggaggcgaucagaguccaauuaggagauauuacuuuu

SEQ ID NO: 54608 - RNA, 130 nt, Homo sapiens
aaagguuccuuuuccaauuguggggguuagugagacaaaguguaugaaaagcauaaacgcugaagugccauguugguauugcuuagcaacacuuuguucacacugucacguauugcacugcauuuccuuu

SEQ ID NO: 54609 - RNA, 64 nt, Homo sapiens
aaaguaaauagcagaacagugucucacugcaugugugugaugcacaguugcugguagauacuuu

SEQ ID NO: 54610 - RNA, 59 nt, Homo sapiens
aaagugcugagaguucuaacuucauuggcuacguaguggcaaaagcucuacagcauuuu

SEQ ID NO: 54611 - RNA, 55 nt, Homo sapiens
aaagugcugagucuaggcggggcgcgguggcucacgccuguaaucccagcacuuu

SEQ ID NO: 54612 - RNA, 57 nt, Homo sapiens
aaaguggugugaguauguaucuaagucaccugacauugugauucacggcaccgcuuu

SEQ ID NO: 54613 - RNA, 103 nt, Homo sapiens
aaagugguuagugcaacugagaagcugaauuuuuauuguauuuagauuuauauuuaaaugcucacauaaagguagcagcuacaguauuggacggugcagcuuu

SEQ ID NO: 54614 - RNA, 81 nt, Homo sapiens
aaaaaagguuuuaaugcuuggucaagagcagaaaucugauuuuuagcucuuuguuuugacuaggaaauuagaacuuuuuuu

SEQ ID NO: 54615 - RNA, 75 nt, Homo sapiens
aaaaaucugguuuuugcuuggccauugcaauuaagugauuuucugcuuuugcagugucaauaauaauuaguuuuu

SEQ ID NO: 54616 - RNA, 71 nt, Homo sapiens
aaaacuagugaaaucugaagaaggucaugccugaguuaacaguaucaugcugaugucaauuuccugguuuu

SEQ ID NO: 54617 - RNA, 106 nt, Homo sapiens
aaaacucacccacgaccuucaguuacaaucaggagagcagugagcacaacugguuccacaggcaccucacaugcucaccugguguuccugggguucacagaguuuu

SEQ ID NO: 54618 - RNA, 68 nt, Homo sapiens
aaaagaacuugauauucugagaagcugaagaacaauuuguuuuccucagcuagguauuuaggacuuuu

SEQ ID NO: 54619 - RNA, 71 nt, Homo sapiens
aaauauguauuaugcacacacguguuuaugugugcauauauacauguacagguguguguauauauauauuu

SEQ ID NO: 54620 - RNA, 96 nt, Homo sapiens
aacaccaguuaguucuuuuacaucuuaagauugccuuaauuagauaaugguauuuuaguuauggaguaauuuuaagcaguuuuaaauagcuguguu

SEQ ID NO: 54621 - RNA, 64 nt, Homo sapiens
aacagaaagaggaugcagaucucauuuuuauuuggaggaugcagaucacauuuuucugucuguu

SEQ ID NO: 54622 - RNA, 88 nt, Homo sapiens
aacagaacuugaaauuccaggaugcucacggucuacaguguaaaaugcugcacuuuaaggcauccccugagagcgauuucuuucuguu

SEQ ID NO: 54623 - RNA, 67 nt, Homo sapiens
aacagucauggguugccauggugauuauuccaaaugcauugugaucauauggaacuggugacguguu

SEQ ID NO: 54624 - RNA, 58 nt, Homo sapiens
aacagugcuuucaauguucaguauccuuuacaucugcugcucagcuggaaacacuguu

SEQ ID NO: 54625 - RNA, 71 nt, Homo sapiens
aacaugagauacuugguuucuguuucugcauugguuugcuuaggagaguggauuccagcuguauccauguu

SEQ ID NO: 54626 - RNA, 82 nt, Homo sapiens
aacccacuagagagcucugaaguuauagaaccacagcagcaguguguuucuauggucacagaugcuugauuauuagaggguu

SEQ ID NO: 54627 - RNA, 79 nt, Homo sapiens
aacccaugagauauuuagaaauguguucuuuaauucacaaauauuuaaggauuuucucgauaucuuagugucauugguu

SEQ ID NO: 54628 - RNA, 128 nt, Homo sapiens
aaccuccaugcuggauauaagcaaagaggagaggaaagaccuaugcaggaagaaaugaguucuucccuauguguuccuuccugcauagguauuuccccuccuuucuacucauauuuagcaugcagguu

SEQ ID NO: 54629 - RNA, 129 nt, Homo sapiens
aaacugcaacuuuaagcaaaccaacuauagcagguccucaaaugacaucauuucauucaacaucauuuuuuuacagcguugaugagaaaaugugguuuggcuguauguuguuuugccuaaaguuaguuu

SEQ ID NO: 54630 - RNA, 65 nt, Homo sapiens
aaagaucaucauagagggcaugagaaccaaauuauaauggacaucauaugaucagugaugacuuu

SEQ ID NO: 54631 - RNA, 84 nt, Homo sapiens
aaagccuuucuggccgguauuugccucugggggcugcaucaucgucuacccagaguucuuaaauacugagcaacuuaagguuuu

SEQ ID NO: 54632 - RNA, 90 nt, Homo sapiens
aaaucaggaaauacaggguuaguauugguaauuguaauggcaaaauauuuauuuacaagcacaaauuuaauccugucacuuuccugauuu

SEQ ID NO: 54633 - RNA, 67 nt, Homo sapiens
aaaucagugcuuuaucaaguccuccaggugauucugauucauggugaaguuugaaaagcacugauuu

SEQ ID NO: 54634 - RNA, 106 nt, Homo sapiens
aaaucuguuuuccuucccguuagucuaguucugcccauuggcauuaccuggaucaagucgaaugaccaaugggcagagcuagacugaugggaaggaaaacagauuu

SEQ ID NO: 54635 - RNA, 100 nt, Homo sapiens
aaauguauuugauugguuagaauggaaaugcgagguuaguugguggcuucugauuggcuaagccucuacauucauuuuacuguuuauguugguaccauuu

SEQ ID NO: 54636 - RNA, 76 nt, Homo sapiens
aaaugucacagacuccauugaagguaauagguuuagaucaccauuacacuuucuauucaaugagcugaggcuguuu

SEQ ID NO: 54637 - RNA, 92 nt, Homo sapiens
aaaugucuggaaaaccuauuugagauuuuccucaaauauuuccuauuugagggaauaacugaagaaaaauucacuagugcugccagagauuu

SEQ ID NO: 54638 - RNA, 130 nt, Homo sapiens
aaauuacccagucucagguaguaucuuuacagcagugugaagauggacuaauauaguaaguacuuauuuaaaugguguauuagucuguuuucauacugcugauagagacauaccccagacugggcaauuu

SEQ ID NO: 54639 - RNA, 80 nt, Homo sapiens
aaauuacugucagacacuguggccuuuggaccagcuagaagcuugucacgaaaggugacaguguauguugguggaaauuu

SEQ ID NO: 54640 - RNA, 129 nt, Homo sapiens
aaauuaucccuuccuuaaauguucgguagaauuuauuaguaaugcuaucugggccagggguuuuguuuguggaacuuuuuuuuagugguauuaauuauacuucuuuauacauauaaggauaucuaguuu

SEQ ID NO: 54641 - RNA, 61 nt, Homo sapiens
aaauucagggacucauaggcagaagggacuguggccuuaucugagaugagacuuugaauuu

SEQ ID NO: 54642 - RNA, 87 nt, Homo sapiens
aaauuuaaggaggcaccuacucccagggucaugcaaaagccaacuuugcauuugcacaauccugugagugagucccuccuuaaauuu

SEQ ID NO: 54643 - RNA, 87 nt, Homo sapiens
aaauuuuugcauagaccgaugucuuggagcauuuucccuaagcuuuguucuaguaguuuuauagaugugggucuuauguuuaaauuu

SEQ ID NO: 54644 - RNA, 95 nt, Homo sapiens
aaauuuuuguagaucuuucuuauuugauugacuuuagcaggaccauuuagguuccuuuauuagugcaagucaaaucuagaggcauuuaagaauuu

SEQ ID NO: 54645 - RNA, 129 nt, Homo sapiens
aacuccugaccucagguaauccacccgccucagccucugaaagugcugggauuggccgggccaguggcucaugccuguaaucccagcacuuugggaggcugaggugggcggaucacgaggucaggaguu

SEQ ID NO: 54646 - RNA, 87 nt, Homo sapiens
aacuccuuuguagucacagugaccuugucugacuuugcaaauucuggggucauuuuaugaucacuguggauugacuacaggugaguu

SEQ ID NO: 54647 - RNA, 65 nt, Homo sapiens
aacucuauacuuuugggugucgcugcuauaaucuaguucuccuuauugcagauacccaggaaguu

SEQ ID NO: 54648 - RNA, 82 nt, Homo sapiens
aacucuuucucauuuaucuggggagaggguagaggucaggaugacauuuaagucacuccagguuaaagugaaggacugaguu

SEQ ID NO: 54649 - RNA, 73 nt, Homo sapiens
aagccugaguccuuuggccauagcuaaaugauuucauucuuuucaaaucaucuagguugagccaaucaggcuu

SEQ ID NO: 54650 - RNA, 88 nt, Homo sapiens
aagcucccuaggugguuuugaugagcagguaggcuuaagaacuguuaccuuaucucaagaccauuuuuuuuccugaacagcggagcuu

SEQ ID NO: 54651 - RNA, 55 nt, Homo sapiens
aagcuggagugcaguggugcaaucuuggcucacugcaaccucugccuccuggcuu

SEQ ID NO: 54652 - RNA, 55 nt, Homo sapiens
aagcuggagugcaguggugcgaucuugguucacugcaaucucugccucccaguuu

SEQ ID NO: 54653 - RNA, 64 nt, Homo sapiens
aacugcuguuuggguacugguggguugcaacuauuaaaucuccccagacaagccacuuagaguu

SEQ ID NO: 54654 - RNA, 83 nt, Homo sapiens
aacuggacccaucacaggccucagugggaaacuccagaacaguucugccauucuccacauggugugcugugaguggucuaguu

SEQ ID NO: 54655 - RNA, 59 nt, Homo sapiens
aacugguauuucccaugaauuuguaugguauaguacaaguaacagggauaauagcaguu

SEQ ID NO: 54656 - RNA, 58 nt, Homo sapiens
aacuucugccuguauauccaagcauuuccauacaucuugugaaaucuaggcagagguu

SEQ ID NO: 54657 - RNA, 79 nt, Homo sapiens
aacuugucauuguucacaguacucccuggaauuaaacccccaggguuuuagcugauuccuauugugaguaguuuagguu

SEQ ID NO: 54658 - RNA, 78 nt, Homo sapiens
aacuuuuaucucaaugugucuugacugcacauccaguucccuuuaggaguugagauuuucaaggcacgaauaaaaguu

SEQ ID NO: 54659 - RNA, 74 nt, Homo sapiens
aacuuuugaugucuugcaggcacgagaugaguucacaagcaaucagugcuggaaggaugugcaaaauaaaaguu

SEQ ID NO: 54660 - RNA, 93 nt, Homo sapiens
aagaaaguagagaugcuagcagagaaaugacuuacaagagaaugcuaauagugauuaucucuguggguagugcugaaugauuucuauuuuuuu

SEQ ID NO: 54661 - RNA, 78 nt, Homo sapiens
aagaacugacuuuugauaguuuuaaaauuaaucuuugcaugaagguugguuucgcuuuuauccuuuaaguuuguuuuu

SEQ ID NO: 54662 - RNA, 104 nt, Homo sapiens
aagaauuuuaugguuuuagcucuuauguuuaugucuauaauccauuuuuauuacuaguuguuuuggugcaugaugugaauguaagaaaauccaacuucauucuu

SEQ ID NO: 54663 - RNA, 93 nt, Homo sapiens
aagacagcuguuuuucuccuguagccccaucaucuuuuguucacuaucuggucucuaaaagaaaggugggcaacaggugaccagcaguugcuu

SEQ ID NO: 54664 - RNA, 61 nt, Homo sapiens
aagagauggcucuuucuagacuuaauuauaagcuuaguaguccauuggagagucaauucuu

SEQ ID NO: 54665 - RNA, 60 nt, Homo sapiens
aagagguaggaaauggucauuuuuaguuaaauauugaaaauggugccggguuuaucucuu

SEQ ID NO: 54666 - RNA, 74 nt, Homo sapiens
aagaugaaagguauguuuucugugacauuuuucaauacucaguucugucacaacaaggaaaauauuuuucacuu

SEQ ID NO: 54667 - RNA, 64 nt, Homo sapiens
aagaugauguuguguuuucacuuuguuggugugaauaguugagugaaaauauccaacucauuuu

SEQ ID NO: 54668 - RNA, 79 nt, Homo sapiens
aagauggacaauggauggauagaaggaugauggauggaugugugcauaaaugcuuagaucuguauauaugucuaugcuu

SEQ ID NO: 54669 - RNA, 71 nt, Homo sapiens
aagauuagauggcugugcguggcuuuauuucuggauucucuauucuguuccauugcauacuaucugauuuu

SEQ ID NO: 54670 - RNA, 64 nt, Homo sapiens
aagcaauggcaauguaagucagaaaaauggaagugcuguuuuuggagaauuguauugccagcuu

SEQ ID NO: 54671 - RNA, 55 nt, Homo sapiens
aagcacacagaggcggaaggacauaaaguuccugguugauuucccuuugguguuu

SEQ ID NO: 54672 - RNA, 76 nt, Homo sapiens
aagccagugugacaggaaacuuugugucuucugugugacauaaaaccauccauuguuucuuaaauuccauuuguuu

SEQ ID NO: 54673 - RNA, 75 nt, Homo sapiens
aauaauggagcugugauuugaguccagaucuaacaccacagauguucuuuccucuauguuacgguuccaguuauu

SEQ ID NO: 54674 - RNA, 73 nt, Homo sapiens
aauacaaauaaagugcuuaggauaguguguggcauacguuaggugcuacauaaauguuagcauugcauguauu

SEQ ID NO: 54675 - RNA, 61 nt, Homo sapiens
aauacaagcaguccaacuccauauuccauaugcuuaacgaguaugaugaacugcuuguauu

SEQ ID NO: 54676 - RNA, 80 nt, Homo sapiens
aauacaguacauaaaaugcuuuugaucuuggaaaaguuucuuauaaagguacuucauucucuggaucagaauacugaguu

SEQ ID NO: 54677 - RNA, 130 nt, Homo sapiens
aauacaguggguccuagccacguguggcuaucaagcaccugagauguggcuagagagguugaggaacucaauuuuuaacuaaucuacaucuaaauuuauauagccacauggggcuagaggcuccuguguu

SEQ ID NO: 54678 - RNA, 100 nt, Homo sapiens
aauacaugcuugcuaugacauaauugugaugauugaaauacugugugugacaugacuagcacagugcuuggcacacaguaauaacauagcugccaguauu

SEQ ID NO: 54679 - RNA, 61 nt, Homo sapiens
aauaaaauauccuuauucuuacaaaauccaagcaggaaguggcagugggagauauuuuauu

SEQ ID NO: 54680 - RNA, 61 nt, Homo sapiens
aaguucagauuugacugguuucucaugagccacaugugggaauguagcaaaucugcaauuu

SEQ ID NO: 54681 - RNA, 68 nt, Homo sapiens
aaguuccaaugcacauaaaauccuccagggugcauuuuuacuuuggaagugggugugugugguaacuu

SEQ ID NO: 54682 - RNA, 65 nt, Homo sapiens
aagugcaaauucccaggcucuggcccaagacagucugacuggguggagccugggagucuggauuu

SEQ ID NO: 54683 - RNA, 60 nt, Homo sapiens
aaguggaauguuuguggcacaaagaaaggauacauucuugaggugacagauacuucacuu

SEQ ID NO: 54684 - RNA, 78 nt, Homo sapiens
aaguggauugguuaauuuuuuuacuuuuuguuaccacaaaguucuugcugaaggauuauauuguuuaucaauccauuu

SEQ ID NO: 54685 - RNA, 67 nt, Homo sapiens
aagugggaggaucucuugaggccaggaguucaagacgagccuuggcaacauagugagacccccauuu

SEQ ID NO: 54686 - RNA, 84 nt, Homo sapiens
aaguuaaugggugcagcacaccaacauggcacauguacauauacguaacaaaccugcacguugugcacauguacccuagaacuu

SEQ ID NO: 54687 - RNA, 70 nt, Homo sapiens
aagguuuggcuccguuguacaggcuggagugcagugaugcaaucucagcucauggcagccuugaacgcuu

SEQ ID NO: 54688 - RNA, 84 nt, Homo sapiens
aaguacuucaacagucagcccauccacagacccuaccauacagccuucccagaaucucuggaugcacugauuggugaaugacuu

SEQ ID NO: 54689 - RNA, 87 nt, Homo sapiens
aaguaguccaaagaaucauuguuucuaaguuugugagaaaggauguugauaguuugauaggaacaauggugaaucuguagauugcuu

SEQ ID NO: 54690 - RNA, 61 nt, Homo sapiens
aaguaugucuugagacauacuugagacuggguaauuuauaaguauguaucaagucauacuu

SEQ ID NO: 54691 - RNA, 93 nt, Homo sapiens
aaguauuaguagaugguauuauagguuucuguuccucuacacaguccauuuaaggaggaaaaauaguuuuucuaauaccaucuuaagugacuu

SEQ ID NO: 54692 - RNA, 59 nt, Homo sapiens
aagucaaggagagaagcuucaggagaaaccaacccugcuggcacuuugaucuuggacuu

SEQ ID NO: 54693 - RNA, 113 nt, Homo sapiens
aaguccaugcucuuugccucaguugaaggagccagaauaugcaucccaacuauaggcaaggccacugagaugcauauucuggcuccuucaacugaggcaauaagcauggacuu

SEQ ID NO: 54694 - RNA, 95 nt, Homo sapiens
aaggcagagaccugauucguacaguaguaaaagugaaugaacauuggcaacauuuauucaccauuuauuaugugaaguccugaaaauccugccuu

SEQ ID NO: 54695 - RNA, 86 nt, Homo sapiens
aaggcaguuccuggauuaucaacaauuaauuuucacacaucccuuccacagaaacagucaauugcugaugaccugcagagcuccuu

SEQ ID NO: 54696 - RNA, 73 nt, Homo sapiens
aaggcaugauuguauuuugcucugugauaaggacaugagauucugggauaucaggguaagaauaauaugguuu

SEQ ID NO: 54697 - RNA, 67 nt, Homo sapiens
aagggacagccauggggcgcagccaacggggaguuauaaaggugguuaacagcacaugcugucccuu

SEQ ID NO: 54698 - RNA, 96 nt, Homo sapiens
aagggauaaauauguaauagcagcuugucagggcagacuguauucugauguccccacaugguucuguccccuagaagcuguuuacauuauucucuu

SEQ ID NO: 54699 - RNA, 78 nt, Homo sapiens
aaggaggaucccagcuccagccccuggugcccugggguggguucugcaggacaccugguguggaacuggagucuccuu

SEQ ID NO: 54700 - RNA, 56 nt, Homo sapiens
aaggauaacugaguuugcugcuacccucucucguagcaccaauaaucagaguucuu

SEQ ID NO: 54701 - RNA, 56 nt, Homo sapiens
aaggggugaacacaguacuugauagguuguuuuucaaucacugucuguuuccccuu

SEQ ID NO: 54702 - RNA, 90 nt, Homo sapiens
aaggucagauauguaguaguugaaaaagaaguaggguuaaaaauaauaauaauacccuucccucugacauuaaucauugauauugaccuu

SEQ ID NO: 54703 - RNA, 57 nt, Homo sapiens
gaaagagaggggcugagaugcagaccagucuguucucucaguggcuuccucacuuuu

SEQ ID NO: 54704 - RNA, 68 nt, Homo sapiens
gaaaaugagguuuugcuauaguuaaugcaucucaagauggcauauaauauagaagacuaguaguuuuc

SEQ ID NO: 54705 - RNA, 57 nt, Homo sapiens
gaaaagccucuccucuccagguagacacagccccauuuggggaauggagagguuuuc

SEQ ID NO: 54706 - RNA, 62 nt, Homo sapiens
gaaagugcugagacagacugggaagccuuuggcuaccggcuuccacugucccuggcacuuuu

SEQ ID NO: 54707 - RNA, 65 nt, Homo sapiens
gaaaguuuagauuuuguugcaccacaguuauuuuaauggcuguaauguaaugagacuacauuuuu

SEQ ID NO: 54708 - RNA, 115 nt, Homo sapiens
gaaauaagggaaaaaauccguaaaauguucaaaguuggaggacaaacuguuuaguuuuaauauuuuuaguguauuuaucuuuggaauuuguuuuaugucuuuuuuuuuuuuuuuu

SEQ ID NO: 54709 - RNA, 98 nt, Homo sapiens
gaaaucaucuuaagugcauaucuucuuccucauuuauacauacaaagagcuguauggcaaugcauaggaaggaaauggcacaggaaaugaacauuuuc

SEQ ID NO: 54710 - RNA, 127 nt, Homo sapiens
gaaaugaaacuuagcagauuguagcauauuaucuuuuugauauguaguuggacuugauuuucuugugucuuguugaggauuuuuccaucuauagucaucagugauauugaucuguaguauucauuuu

SEQ ID NO: 54711 - RNA, 111 nt, Homo sapiens
gaacuuucccacagaacauaaauaaaaugcacgcuacccagcuagauuuugguguuagaaaucugugcugcaggagucugcauggcuuuuugaaaugaucugagaaaguuc

SEQ ID NO: 54712 - RNA, 73 nt, Homo sapiens
gaagacaguggucaguugaguccuugccaagccaggcuggcuucgaggaggagugauugaggcgauuguuuuc

SEQ ID NO: 54713 - RNA, 63 nt, Homo sapiens
gaacuauggauguucuagggaugugaugauggaaaauauuacaaaugcccauacaucuaguuc

SEQ ID NO: 54714 - RNA, 56 nt, Homo sapiens
gaaaggaguaaguagguaaaucuugcaaaaugugccuaugaucacuugcuucuuuu

SEQ ID NO: 54715 - RNA, 55 nt, Homo sapiens
gaaauggaucagagcaagcuuuuuuuggucauucaucagucuucugauccauuuu

SEQ ID NO: 54716 - RNA, 104 nt, Homo sapiens
gaaauacuacuuagugguuacguugugguuuuuaaaacuagguggauuuuuuuaauugucuaccuuuaauuuagaugccacgucuuuccaauuaagaauauuuc

SEQ ID NO: 54717 - RNA, 78 nt, Homo sapiens
gaaccaucucuucucaggcuuuucccagagugaugucaacaagacaauucaugugaagggcuugaaucucugugguuc

SEQ ID NO: 54718 - RNA, 112 nt, Homo sapiens
gaagugguacaguuucauggccaguaugcuuauaaacauuugucagagaaauugagcacaccucaggaaauguuuaguggguugaaugcccagggaagcuguuaaacauuuu

SEQ ID NO: 54719 - RNA, 77 nt, Homo sapiens
gaagcuuggcaguggugugugccagccuagguuccagcucccugacccugagcuggcugccacaauugcuggguuuu

SEQ ID NO: 54720 - RNA, 65 nt, Homo sapiens
gaaggaucuggagucuugaugauuuucaaaugaacucaucugaauucucagggucuucuuccuuc

SEQ ID NO: 54721 - RNA, 87 nt, Homo sapiens
gaaggcuuaagaagugagauauucugguuuacuaaaucucuuuauggauucaguauuaaccagaaauuucuuuuuguugagacuuuu

SEQ ID NO: 54722 - RNA, 96 nt, Homo sapiens
gaagggaacacaugauaggucuguuuugaaaaggaauggggacagaacaaaauauuacuaggucugaucaaaagaggcuuguucuggcuugucuuu

SEQ ID NO: 54723 - RNA, 74 nt, Homo sapiens
gaagaugcauuaagggccuggagauacacuggucaacaagacaaguauggugucuccugccuucaugcagcuuc

SEQ ID NO: 54724 - RNA, 55 nt, Homo sapiens
gaagauggaggcugcagugagcugagauugugccacugcacuccagucccgucuc

SEQ ID NO: 54725 - RNA, 55 nt, Homo sapiens
gaagauucaaccaaaccagaacaccaauaaaacggguugacuugguugaauuuuu

SEQ ID NO: 54726 - RNA, 89 nt, Homo sapiens
gaagcaagugcuuuacacaugcaugauuuuaucaaggagauuauggagaccuugaaggccauccaugcauguuaaaaaccuuugcauuc

SEQ ID NO: 54727 - RNA, 78 nt, Homo sapiens
gaagcaaguggccuugagguugacggaauauucugaaacauuacgagaacugaucaauguuaaggcuuauaaugccuc

SEQ ID NO: 54728 - RNA, 56 nt, Homo sapiens
gaagccagagugagcaugaaacucuuccugagaaagacaugugcacuacuggcuuc

SEQ ID NO: 54729 - RNA, 72 nt, Homo sapiens
gaagagaccauucuauguagagggaacagccugagcaagagggcuggaggccugaacauaaaugguguuuuc

SEQ ID NO: 54730 - RNA, 63 nt, Homo sapiens
gaagaggaaguggcauugcaguugagacugagucuguuugccucugcacauccacucuacuuc

SEQ ID NO: 54731 - RNA, 88 nt, Homo sapiens
gaagaggauggaguguggaagucuuugguauugguagucuuaucucagauuuauuguggcuagaauuuuuaccuacuucaugcucuuc

SEQ ID NO: 54732 - RNA, 79 nt, Homo sapiens
gaagcucagagaagggugugauuugccugagaccacacagccgguaacaggcaaggucacaccuugaacccgugucuuc

SEQ ID NO: 54733 - RNA, 104 nt, Homo sapiens
cuugaggcacuguagugaaacuuugucauuaguaacgacuuuugucuaacacagauuaaccaaucaagagucaaaugcuuauguauaaagcacacugcuuuaag

SEQ ID NO: 54734 - RNA, 67 nt, Homo sapiens
cuucugccugagacucagaaugagacuguggaucaugacagaaucaaauuccaagucuagguaggag

SEQ ID NO: 54735 - RNA, 70 nt, Homo sapiens
cuugaacccaggaggcggaaguugcagugagccaagauugugacauugcacuccacuccugaacaacaag

SEQ ID NO: 54736 - RNA, 69 nt, Homo sapiens
cuugaacccaggaggcggagguuguggugagccaagaucacgccauugcacuccagucugggcaacaag

SEQ ID NO: 54737 - RNA, 57 nt, Homo sapiens
cuugaacuagccauaaagaagccuuugcucuuagaagguucauguaauuaguucagg

SEQ ID NO: 54738 - RNA, 69 nt, Homo sapiens
cuugaacucaggagguggagguugcagugagcugagauugcgcuauugcacgccagccugagcaacaag

SEQ ID NO: 54739 - RNA, 130 nt, Homo sapiens
cuuccaaaauaucuucuaaauauauguuguagauuaaguugugccugaaaacuuguaaucacaaaaaaaucacaaguaucaaauauaaacuuguauuuauucagcagcucaccugaucauuauuuggggg

SEQ ID NO: 54740 - RNA, 84 nt, Homo sapiens
cuucgcagucagguauuucugaggaagagacauaugaaacgcaugugguuuuucacauuuagagaaagugacgacuguaagaag

SEQ ID NO: 54741 - RNA, 125 nt, Homo sapiens
cuucggccucccaaaaugcugggauuacaggagugaguuacugcacccaucaucuguucuuuuaaaaauccauggccgggugcgguggcucacaccuguaaucccagcacuuugggaggccgagg

SEQ ID NO: 54742 - RNA, 56 nt, Homo sapiens
cuucucagugcucaucuuauuuaauauuggcagugggacugugaugcauugaggag

SEQ ID NO: 54743 - RNA, 55 nt, Homo sapiens
cuucuggaagcuccaaggaagaaucuguuucuuugcgcuuugcagcuuccagagg

SEQ ID NO: 54744 - RNA, 71 nt, Homo sapiens
cuucuggcuggggcacagucugaauguuucugaauccagcaaagaaugcagauuugccucagggcuugaag

SEQ ID NO: 54745 - RNA, 90 nt, Homo sapiens
cuuccgcuguaauucauuuacugaacacccacuaggugcuaaggaccaagccagguggugguauuucagaaaaugaggacacauuugaag

SEQ ID NO: 54746 - RNA, 56 nt, Homo sapiens
cuuccugcagaagcacacagccucaggagcuuccgaacugugcauuucuguggaag

SEQ ID NO: 54747 - RNA, 64 nt, Homo sapiens
cuuccuucacuuuuuaugccagauugagacaguuucuucuauuuggguaaugagugcaagggag

SEQ ID NO: 54748 - RNA, 73 nt, Homo sapiens
cuucacauauaaauacaacauguguuaaaggacuaaauuucuagugucacaguuuguacuuuauaguuugaag

SEQ ID NO: 54749 - RNA, 129 nt, Homo sapiens
cuucagccucccaaagugcugggauuacaggcaugagccacugugccuggcccaauuuuuuaaaugauacaaaaaguagcuggaugcaguggcacauaccuguagucccagcuacuugggaggcugagg

SEQ ID NO: 54750 - RNA, 120 nt, Homo sapiens
cuuacuauucacaaacacaucaaggaauuuuucuuuaaucaggucaaaauaaaguauuuucuaacacugauauauugaaugaugaaacagaguccuuugaggauuaaaugaaguaguggg

SEQ ID NO: 54751 - RNA, 82 nt, Homo sapiens
cuuacucaacuuuauggcauucuguauaacauugcuccugaccaaggagcuuguuuuauagaaagucaaguguaccagugag

SEQ ID NO: 54752 - RNA, 130 nt, Homo sapiens
cuuaggagugacuuggcaaugcgggcccuuuuuuguuccauaugaacuuuaaaauaguuuuucccaauucugugaagaaagucauugguagcuugaugggguuggcauugaaucuauaaauuaccuuggg

SEQ ID NO: 54753 - RNA, 69 nt, Homo sapiens
cuuaggguugcaauaaaauaucuguacucaauaacuauucauugaaugauggaguaauguaaucuugag

SEQ ID NO: 54754 - RNA, 61 nt, Homo sapiens
cuuauuagaaagaaaagacaugguggguuuuuuccccuuuauucuuugcuuuucuaagagg

SEQ ID NO: 54755 - RNA, 66 nt, Homo sapiens
cuucaaguguggccaccugaccagcucccaagacaacacugcuugucaggggaccauacauugaag

SEQ ID NO: 54756 - RNA, 90 nt, Homo sapiens
cuuggauaugucuuuaucagcagugugaaaauggacuaauagaguaaauuuguauuaguagaguggggcgcugcugaaaagacauccaag

SEQ ID NO: 54757 - RNA, 82 nt, Homo sapiens
cuuggaucucagugcuuguuauuguucuauucggguuuuuaauuucuucagaguuuaauuauagcagguucuuuugucuagg

SEQ ID NO: 54758 - RNA, 89 nt, Homo sapiens
cuugauuugaaaaaaaugcugcccugauuuuacauauauccaggauggauaugucuauuauuagggcagguuaugagggauaagucaag

SEQ ID NO: 54759 - RNA, 86 nt, Homo sapiens
cuugccaagugcauggagcaacagaccuaucacaguuacagccccacggcacuggaagugucugugcccagcucugcugacccaag

SEQ ID NO: 54760 - RNA, 84 nt, Homo sapiens
cuugugggcauuuagugcuauaaauuucccucuacacacugcuuugaaugugucacagagauuuugguauguugcaaacacaag

SEQ ID NO: 54761 - RNA, 59 nt, Homo sapiens
cuuuaucauagugcaguuuucugacuccugugucagggucaccugccgcuguggaaggg

SEQ ID NO: 54762 - RNA, 60 nt, Homo sapiens
cuuuaugagguuggauggaucugggcuugaauccugauucauuuucuacuuugcuugaag

SEQ ID NO: 54763 - RNA, 86 nt, Homo sapiens
cuuuauuucuggcuuugccuuugugauauggucuaucagaugauugauaaaaucuaucuagaguaaggauauaagacaaaauaaag

SEQ ID NO: 54764 - RNA, 84 nt, Homo sapiens
cuuucaugguggguuccugagacugaggagcuuuggacggaugcuuggcuguugggaaugucccagucacaggacacuguaaag

SEQ ID NO: 54765 - RNA, 65 nt, Homo sapiens
cuuucucagugagacccgagaugcuauguaagucuaacaaccaccucacugcuguacuggggaag

SEQ ID NO: 54766 - RNA, 57 nt, Homo sapiens
cuuucuccaaucuaagggaagaaggccugguuuuuguauguuggagauuggagaagg

SEQ ID NO: 54767 - RNA, 69 nt, Homo sapiens
cuuucugggggugcugauggaaacuccuacccaggcaaaucuuguuucccaggcauucccccagugaag

SEQ ID NO: 54768 - RNA, 130 nt, Homo sapiens
cuuucuuugaagcaucauauauuuuagguugguguaacaguaauugcaguuuuugccauugaaaguaauggcaaaaaucacaaguaccuuuguaccaacauaacagauaagaaaauucaucagaagaaag

SEQ ID NO: 54769 - RNA, 66 nt, Homo sapiens
cuuugaaacuuacuguuaauuuucugucucguugaucugucuaauguugacaguggguuguuaaag

SEQ ID NO: 54770 - RNA, 66 nt, Homo sapiens
cuuugaaacuuauuguuaacuuucugucucguugaucugucuaauguugacaguggguuguuaaag

SEQ ID NO: 54771 - RNA, 85 nt, Homo sapiens
cuuugaauugugacuaggagauauguuuucuucagcuuuggcugcaucaaggagaagauacaaauuucuuagaugcggaucaaag

SEQ ID NO: 54772 - RNA, 61 nt, Homo sapiens
cuuuuaacauuaaaucuuauucuacuguaguaacaauauaaguggaaugaaauguuagggg

SEQ ID NO: 54773 - RNA, 67 nt, Homo sapiens
cuuuuaaugagguaaaggacaauguuuugauaaguauuaaugcacauuuauuuuaccuuucugagag

SEQ ID NO: 54774 - RNA, 55 nt, Homo sapiens
cuuuucuugugauucagcaaguaggaaacacucuuuuugcagaaucuaagaagag

SEQ ID NO: 54775 - RNA, 80 nt, Homo sapiens
cuuuugagaagcuugaccugcagauucuuacaguccaaguuuugcugugguuugugaauggaguagcaggaucacagaag

SEQ ID NO: 54776 - RNA, 101 nt, Homo sapiens
cuuuugcuuuaguuuauagacugguuuauuauacaguuuauuuguaaauuuggcucaucauagaauguauuaguaaauuuguccauaggcagaagccagag

SEQ ID NO: 54777 - RNA, 96 nt, Homo sapiens
cuuuuuuaaaaauucuaacgacuuccauaauuugcaucucaucuauucaggugagguaggaaaaguuaggaaugguuuguuauuauuuauaaaagg

SEQ ID NO: 54778 - RNA, 125 nt, Homo sapiens
gaaaaaugacuccagaaucuuuaaaucugcucuacuguauagauggaguugauuuuuaaaaguugaaaaauauuauaagaugauuuuauuuacaguaaguugacuuaggauuggacuuauuuuuu

SEQ ID NO: 54779 - RNA, 128 nt, Homo sapiens
cuuugauuuugacgagcaaaagcccuuguuagcauauaccaugcaguccaauaugcacauauuggaauauaugcauauuggacugcauggcauauccuaacaagggcuuuugccuguuaaaaccaaag

SEQ ID NO: 54780 - RNA, 58 nt, Homo sapiens
cuuugggagaaacguaguuuauaguuuaaacaaagacaguaacagcacuuucccaaag

SEQ ID NO: 54781 - RNA, 58 nt, Homo sapiens
cuuugguguauuuucagagaccaaauuuuaggucaguggucucccagaaucacuaaag

SEQ ID NO: 54782 - RNA, 126 nt, Homo sapiens
cuuugucaugcucguugauacacacucccaccuagcgccuugcacucagaagauucaguucauauaucuguuaauugacucuaacugacugagguucccuggaugaggagagcaaugagaacagag

SEQ ID NO: 54783 - RNA, 58 nt, Homo sapiens
cuuuguggcuccugcaggccauuuggauguauacgggcaggucacagggguuacaagg

SEQ ID NO: 54784 - RNA, 99 nt, Homo sapiens
gacauaguugaguuugggguccugagauauuauuucccuuucacaguaguauauaguguguggguaguagauuucauuuugcagauuauaauuacuguc

SEQ ID NO: 54785 - RNA, 64 nt, Homo sapiens
gacauccacaugcaguuggaaacaggcaguugaacacaccuguuugaagcucaugggugagguc

SEQ ID NO: 54786 - RNA, 76 nt, Homo sapiens
gacaugauuaaguauuaugugcugcauuuugagacaauccaaaaugugaaagccuauaacgacugacuguuguguc

SEQ ID NO: 54787 - RNA, 86 nt, Homo sapiens
gacagggaugcuguuuggagcuucuggcaugcccccauaggugaaucacaauggaggccuacagaauuuuggagcaaggcccuguc

SEQ ID NO: 54788 - RNA, 109 nt, Homo sapiens
gacaggggacgaugcacaggacaggaguguguaggagaaagguaaccacgaucuaaucagucaaucuugccuguaacuguugccauguuuguguguuugugucccuguc

SEQ ID NO: 54789 - RNA, 64 nt, Homo sapiens
gacaggugagcuuucucauccgacuucauacccuuuuguuguugagauagggucucacucuguc

SEQ ID NO: 54790 - RNA, 57 nt, Homo sapiens
gacagagaucaugcaacugcucgccuuaggaggcgaaagucaacagguacucgaguc

SEQ ID NO: 54791 - RNA, 95 nt, Homo sapiens
gacagagucucgcucuauugccuaggcuggagugcaguagcaugaucucaucucacuacaaccucugccucccagguucaagcgauucuucuguc

SEQ ID NO: 54792 - RNA, 80 nt, Homo sapiens
gacagagugaauauuauauaaggcugaauaauauucuauuguauauauacaucaugucuuguuguauuuauuuaccuguc

SEQ ID NO: 54793 - RNA, 96 nt, Homo sapiens
gacaggagaaucacuugaacccaggaggcggagguugcagugagccgagaucgcaucauugcacuccagccuuggcaacaagagugaaacuccguc

SEQ ID NO: 54794 - RNA, 91 nt, Homo sapiens
gaaucuauggcccauuacccagaggaacguuuggauugauuaucagaaguacacuucaaggaauucaaauuuucucuggagucauagauuc

SEQ ID NO: 54795 - RNA, 73 nt, Homo sapiens
gaaugaggucacgugcuauuugccuuucugauaccuggccuaugucacuaaagaaaauggcauggacgcauuc

SEQ ID NO: 54796 - RNA, 66 nt, Homo sapiens
gaaugcaggaaugcacaugccuucgauacacaaaccaaaaaugauacaaugugcaauuuuguauuu

SEQ ID NO: 54797 - RNA, 65 nt, Homo sapiens
gaaugccugagaggauaugauccccuugaagcugauuacaggguagacauacaucucagccauuc

SEQ ID NO: 54798 - RNA, 77 nt, Homo sapiens
gaauaccaagugaaugaugugaaguguaaaccaaccauuguuguguuucauguuacugucauacacuuguuuccuuc

SEQ ID NO: 54799 - RNA, 67 nt, Homo sapiens
gaauagaauguauauucuguaguuguuggguagaauguucuauaaguauccauauauacauuuguuc

SEQ ID NO: 54800 - RNA, 81 nt, Homo sapiens
gaauagggaccuuagaauuguauguauguuucuaggcuaauauuugcaagacaugucuaagguuuaaaguuuuuccuauuc

SEQ ID NO: 54801 - RNA, 79 nt, Homo sapiens
gaauauaaacaguaggcuaaagcuauaucuuacccucaaaucugggugaaaugaucaguuugguuacugcuuuauauuu

SEQ ID NO: 54802 - RNA, 58 nt, Homo sapiens
gaaucacugugguaucccaugcuuggaaugucaguaaagguguggccaauagugauuu

SEQ ID NO: 54803 - RNA, 60 nt, Homo sapiens
gaaucauugagagacugagcuauauaauacuuguauagagcugugucuucuuaaagauuu

SEQ ID NO: 54804 - RNA, 60 nt, Homo sapiens
gaauccauguguacuccauguuuuccacuuauaagugagaacauacggcauuugguuuuc

SEQ ID NO: 54805 - RNA, 65 nt, Homo sapiens
gaaguuuaguguuuugaaacauauagaagcaaacacugcuucuauguuugaaaaugccaaauuuc

SEQ ID NO: 54806 - RNA, 122 nt, Homo sapiens
gaaguuuccucagcugggaggggaaggacauggaguguaauauugagagcugcagcuguguguuuggcuagggcuuccacuugcagcuccauaucaacuuuggcugccugugaggaaauuuu

SEQ ID NO: 54807 - RNA, 56 nt, Homo sapiens
gaaugucauauaauuggaaucagccuuuucaaauuggcuucuaauaauaugcauuu

SEQ ID NO: 54808 - RNA, 67 nt, Homo sapiens
gaauguucaguagucaaaagauaagggucauagggguuuugaugucuugucaaucuauuuaacauuc

SEQ ID NO: 54809 - RNA, 95 nt, Homo sapiens
gaauucauaggaguuugggauucauaucaagucuuagaguuuaagugucauaagcugauggucuuguaugaugucauuacuccuauuauguauuc

SEQ ID NO: 54810 - RNA, 63 nt, Homo sapiens
gacaaauuuguaaauggguauucagugggaagugacugaacaaaaccauucaacagauuuguc

SEQ ID NO: 54811 - RNA, 56 nt, Homo sapiens
gacaagaaaagauuguuccuguuuucuccuuuuaggaaguaacuaucuuuucuguc

SEQ ID NO: 54812 - RNA, 106 nt, Homo sapiens
gacaaggaacaaauucucccucggaggcuccagaagaaaccaaccaugccaacaccuugauuuuggucuucuggccuccagaaccgggagagaauauauuucuguu

SEQ ID NO: 54813 - RNA, 55 nt, Homo sapiens
gacaauauuaagagaagacagcccauguuaauggauugaaagcuuuaauauuguu

SEQ ID NO: 54814 - RNA, 80 nt, Homo sapiens
gacaaucagaauaugcaucuaucuagugagcagagggaugacuuugaauagaauggaaggcauguuugcccugagcaguu

SEQ ID NO: 54815 - RNA, 64 nt, Homo sapiens
gacaauguuauaaaguaugagaccugaacaaaaauuucaggugcuuacuuaauagccauguguc

SEQ ID NO: 54816 - RNA, 90 nt, Homo sapiens
gacacagugagaauugcucaaaucaguacuugagugguucaauguuaaggugaauuucagguacaauuugagccagagguucauaguguc

SEQ ID NO: 54817 - RNA, 78 nt, Homo sapiens
gacaccuaacaauuauucagugacuuaagagauauacuagucuguuucuuagucauguaauaguccagguuagguguu

SEQ ID NO: 54818 - RNA, 60 nt, Homo sapiens
gacaccuugauugcagccuugugaaucagaagauucacuguuaagcaguuaaacuguguc

SEQ ID NO: 54819 - RNA, 58 nt, Homo sapiens
gacacgcugugacaguccagccaucaguuuugccgaugaacuggaugucgaguguguu

SEQ ID NO: 54820 - RNA, 58 nt, Homo sapiens
gacccugcugaucaggucuuaaaguccaaaacucaugagaugucugauugcgaggguc

SEQ ID NO: 54821 - RNA, 56 nt, Homo sapiens
gacccuggcuaccugguaggcggaaccaugucacuugugccauguagcacaugguc

SEQ ID NO: 54822 - RNA, 71 nt, Homo sapiens
gacgugaguuuugggggggcugguaaaagaaugcuaugguuugaguauuuguccccuccaaaagucauguu

SEQ ID NO: 54823 - RNA, 64 nt, Homo sapiens
gacuaggagagcagcugcccauggcucgaagccuuccaacucgugggcaguggcccaccugguc

SEQ ID NO: 54824 - RNA, 62 nt, Homo sapiens
gacugaucuuaucuccugauaccucccuuucccugaggcccuucacaagccaagaucacguc

SEQ ID NO: 54825 - RNA, 70 nt, Homo sapiens
gacugugaaaugcaagguauauucaugagagaacugcgacucucacaugaagauuuuaguauacacgguu

SEQ ID NO: 54826 - RNA, 57 nt, Homo sapiens
gacuuaaucaucauuuaaaggcccaaccuguaaagcuaucacauuggugauuaaguu

SEQ ID NO: 54827 - RNA, 80 nt, Homo sapiens
gacuugucuguguauuacuugucugugucucaauuuccucaucuucuaaaaugagaauacagcaguaaccacuggcaguu

SEQ ID NO: 54828 - RNA, 125 nt, Homo sapiens
gacuuuaauucuggcacuauguauggcucucugggucuggguuuguguugccuaugccugcagaugguguagcagccauaaacacagugagcagaacagcaaaucagucaguuuuuggaacaguc

SEQ ID NO: 54829 - RNA, 62 nt, Homo sapiens
gacuuugucuugcauccuacauacaagcucaaccacaguagaauagggcacgaggcagaguc

SEQ ID NO: 54830 - RNA, 129 nt, Homo sapiens
gagaaaacugaggcacaggaaagaaaguaccuuauccaagaucauacagcuaguaaguguaagagauccaucgucuccuguacuuucuaaguuguuucaucaguuagguuccuucucucuuauuuucuu

SEQ ID NO: 54831 - RNA, 71 nt, Homo sapiens
gagaaagcuacauuuuauuuaugucaguguguaaaauuauaaccugauaaugaaagaaauacaguuuuuuc

SEQ ID NO: 54832 - RNA, 90 nt, Homo sapiens
gagaggaucacaugagccugggagguugaggcugcaauggguugugaucgcaccauugcacuccagccuaggcaacagagugagacuguc

SEQ ID NO: 54833 - RNA, 89 nt, Homo sapiens
gagaggaugcaggugacuuuucugagacaaugcuuugcagcuuguaugagauucuuagagaagucugguccucccugccccagccucuc

SEQ ID NO: 54834 - RNA, 80 nt, Homo sapiens
gagaaguagugguccaguuuuguuaacauaugguuauccagcugucugagcaccauuuguugagaagacuguccuuucuc

SEQ ID NO: 54835 - RNA, 67 nt, Homo sapiens
gagcaacacuguuuauuggauagcccuaaagaacccuuuacuuggcaucuagggaacauguauguuu

SEQ ID NO: 54836 - RNA, 91 nt, Homo sapiens
gagcagaaaucaguuaucguacauacuucacagacuuuaaaguuuuuugcacuuuacuccucagugauaugugaacauggugucacugcuc

SEQ ID NO: 54837 - RNA, 62 nt, Homo sapiens
gagauccaucucacaugcaaugauacccauggguucaaaguaaagggauggagacaggucuc

SEQ ID NO: 54838 - RNA, 59 nt, Homo sapiens
gagaucugggguuggcaaaguuuggcccuugggccgagucuggccugcugccaguuuuc

SEQ ID NO: 54839 - RNA, 99 nt, Homo sapiens
gagauggagucuugcucugucacccaggcuggagugcaguggcaggaucucggcucauugcaaucuccaccucccggguucaagcgauucuccugccuc

SEQ ID NO: 54840 - RNA, 66 nt, Homo sapiens
gagauggaguugucgccugggcuggagugcaauggugugaccucggcucacugcaaccuccaccuc

SEQ ID NO: 54841 - RNA, 99 nt, Homo sapiens
gagauggggggaucacuugaggccagaagugugaggcuacagugaccuauaauugugccacugcacuccugccugggugacagagugagucccugucuc

SEQ ID NO: 54842 - RNA, 59 nt, Homo sapiens
gagauggugugcuguuggaaguggcuucaauccaaggcuuccaacaacgacaccgucuc

SEQ ID NO: 54843 - RNA, 78 nt, Homo sapiens
gagauuagacuguccagacccuauauaucauaguuacacaagcugaccccaugguauggaaggucuggaggacaucuc

SEQ ID NO: 54844 - RNA, 87 nt, Homo sapiens
gagauuggaaagcccuuuaaaguaugauauagaagucauaaacaauaugacuauaggauaacaugcauuuuuaaguuuuucaaucuu

SEQ ID NO: 54845 - RNA, 73 nt, Homo sapiens
gagaaaucuccacacuguuuuccauggggguugaacuaauuuacauucccaccaacaguguacaaguguucuc

SEQ ID NO: 54846 - RNA, 87 nt, Homo sapiens
gagaaucgcuuaaacccaggagguggagguuguggugagccgaaaucacaccauugcacuccagucugggcaacaagagugaaacuc

SEQ ID NO: 54847 - RNA, 86 nt, Homo sapiens
gagaaucgcuugaacccgggaaguggagguugcagugagccaagauugcacuguugcacuccagccugggcaacagggcgaggcuc

SEQ ID NO: 54848 - RNA, 69 nt, Homo sapiens
gagaaugugguuuuaguaaaacuauguuagcaguuaagguuagagcaaaguucaggaaagccauaucuu

SEQ ID NO: 54849 - RNA, 100 nt, Homo sapiens
gagacaagagaauugcuugaacccuggaggcugagguugcagugagucgagauggcgccauugcacuccagccugagggacaagagcaaaacucuuucuc

SEQ ID NO: 54850 - RNA, 56 nt, Homo sapiens
gagacacugggauucuuuugaucugggaucccauguuccugagauucccaguucuc

SEQ ID NO: 54851 - RNA, 100 nt, Homo sapiens
gagacaggagacucgcuuguacccggcaggcggagguugcagugagccaagauugcgccauugcacuccagccucggcaacaagagcgaaacuccgucuc

SEQ ID NO: 54852 - RNA, 70 nt, Homo sapiens
gagacagggucuugcucugucgcccaggcuguguaguggcgcgaucucggcucagugcaagcucugccuc

SEQ ID NO: 54853 - RNA, 82 nt, Homo sapiens
gagacauaaaacuggcuagggucaaacgucaucuugaagguuuuuaaggaaagcauuuaauucagcggcagauuuaugucuu

SEQ ID NO: 54854 - RNA, 62 nt, Homo sapiens
gagacauugagaguuucgcugggauuaagaccacauggacuuaacagcuccacuccauucuc

SEQ ID NO: 54855 - RNA, 59 nt, Homo sapiens
gagacguguaggaggcagagugaaaggcuuguuguuagagcugugcuuaauacacuuuc

SEQ ID NO: 54856 - RNA, 69 nt, Homo sapiens
gagacucuccuucaguccaguggguuuugaggcagagccucagaauacagaacugaggaaucaugucuc

SEQ ID NO: 54857 - RNA, 130 nt, Homo sapiens
gagacuuggaaaaguaguucaaauaugcagccuaacagauaaagaugguuucauuuggcuguuagucuauugagauaauuuacuuguugaggaauguuuauuuaauguuuccauaaaaaauugaagucuc

SEQ ID NO: 54858 - RNA, 63 nt, Homo sapiens
gagacuuuaucaugucuguguguaccuaggcaaugccuaguacagauggcaugcuguuuucuu

SEQ ID NO: 54859 - RNA, 60 nt, Homo sapiens
gagagaggaguauagcacugaccauauagccaggaucaguaaaugcuguucucuuuucuc

SEQ ID NO: 54860 - RNA, 65 nt, Homo sapiens
gagagaugguagucacauaugagcugugaagcugguuuacaguguagugacugccaacuucuuuc

SEQ ID NO: 54861 - RNA, 56 nt, Homo sapiens
gagagcaagaugcaaauggaggcuuaauaagagcuugcauauuggaacuuucucuc

SEQ ID NO: 54862 - RNA, 73 nt, Homo sapiens
cucuugaacccaggaaguggagguugcagugagcugagauagcaacacugcacuccagccugggcaacaagag

SEQ ID NO: 54863 - RNA, 74 nt, Homo sapiens
cucuccugugucaggcacuaguaagaaaaaggcacaacgcuuuuuccucguagagccuaaugucuagaggggag

SEQ ID NO: 54864 - RNA, 64 nt, Homo sapiens
cucugcauuuaagaaagggagggaagagugaaaaggacucugucuugugguuugagugccaggg

SEQ ID NO: 54865 - RNA, 66 nt, Homo sapiens
cucugccagucauauuacccaauacuuuaacauccacuagauauugcagaaugugaguuggcagag

SEQ ID NO: 54866 - RNA, 74 nt, Homo sapiens
cucugccucucaagaugcugggauuacaggcaugagccacuaugcccauuguaauugguguuuuugaagaagag

SEQ ID NO: 54867 - RNA, 100 nt, Homo sapiens
cucugccugucucccaggcuggaguguaguggcgcgaucucgggucgcugcaagcucugccucccagguucgcgccauucuccugccucagccaccagag

SEQ ID NO: 54868 - RNA, 93 nt, Homo sapiens
cuccccauucccugagagcagggucuuucucucccucucugaagacuaagccagaguaaugagacucaccuuugcucugcaguaggugaggag

SEQ ID NO: 54869 - RNA, 72 nt, Homo sapiens
cucuaaguagcagaauaucagauaauuuuaauuuuuuuugagacaggucuuacucuguuacccagguuagag

SEQ ID NO: 54870 - RNA, 61 nt, Homo sapiens
cucuaauuccagcacuuugggugaccgaugagagaggaucacuagaguccuggaguuugag

SEQ ID NO: 54871 - RNA, 76 nt, Homo sapiens
cucucauaagcaauuuccauucagguucaagucaucaucgagaggagaugaugccuagagucaguggaggugagag

SEQ ID NO: 54872 - RNA, 60 nt, Homo sapiens
cugacauaauaaaugccuguuguuuuaagccacugagugugggggcauuucguuaugcag

SEQ ID NO: 54873 - RNA, 76 nt, Homo sapiens
cugacccagcucaguuauagcauuaguggcagcaggguugcuugugccacuccagcucuagcuuuagguggcucag

SEQ ID NO: 54874 - RNA, 83 nt, Homo sapiens
cugaugagggcuugggaugggggauucccugaugguuaauaucagauugacuagggacauucuuccacgccagccaaucucag

SEQ ID NO: 54875 - RNA, 104 nt, Homo sapiens
cugauuuuuguauguggauuuuauauccugaagcuuuacugaauucauuuaucaagucuaagaguguuuugguggagacuuuaggguuuucuagauauaaucag

SEQ ID NO: 54876 - RNA, 81 nt, Homo sapiens
cugcaccaccucuccuccagcuaguauaagcauggagugagaagcugugugccuaguggaaggagagcaaagugagugugg

SEQ ID NO: 54877 - RNA, 105 nt, Homo sapiens
cugacgugagagaaucgcuugaacccgggaguuggagguugcagugagccgagauugcaccauugcacuccagcuugggcaacaagagugaaacucuugucucag

SEQ ID NO: 54878 - RNA, 59 nt, Homo sapiens
cugacuuccuagccuucugguugaccggcagccccagugaccacagcagggaaugucag

SEQ ID NO: 54879 - RNA, 103 nt, Homo sapiens
cugagacagaguuucgcgcugucgcccaggcuggaguacaguugugugaucucagcucacugcaacauccaccuccuggguucaagugauucuccugccucag

SEQ ID NO: 54880 - RNA, 55 nt, Homo sapiens
cugagauggagucucgcauuguugcccaggcuagagugcaguggcgccaucucag

SEQ ID NO: 54881 - RNA, 116 nt, Homo sapiens
cugagcauacuggugugcaccuguagucccaccuacuuggggacugagaugggaggauaacuugagcccuggagguggaggcugcagugagccaugaucauaccacugugcuccag

SEQ ID NO: 54882 - RNA, 67 nt, Homo sapiens
cugagcccagaaguuagaggcugcaaugagccaugauagugccauugcacucuagucugggugacag

SEQ ID NO: 54883 - RNA, 56 nt, Homo sapiens
cugaggacaucagggaagcauccucagaggagaagauuguuuaauugagucuucag

SEQ ID NO: 54884 - RNA, 103 nt, Homo sapiens
cugaggcaggagaaucacuugaagccaggagauggagguugcagugagcagagaucgcgccauugcacucuaucccggugggcagugcgagacuccaucucag

SEQ ID NO: 54885 - RNA, 102 nt, Homo sapiens
cugaggcaggagaaucgcuugaaaccagggggcggagguugcagggagccgagauugcgccauugcacuccagccugcugacagagugagauuccgucucag

SEQ ID NO: 54886 - RNA, 104 nt, Homo sapiens
cugaggcaggagaauugcuugaaaucaggaggcggagguugcagugagcugagaucaugccauugcacuccagcucugggcgacagggcaagacucagucucgg

SEQ ID NO: 54887 - RNA, 112 nt, Homo sapiens
cugcuuaccccuaauuucuuacuuuucuacagugaacgauuucuaaauuacuuauuuucuaacuuuuaggagucuuagcugugaagggaagaaaaaaaacaugggauggcag

SEQ ID NO: 54888 - RNA, 61 nt, Homo sapiens
cugcuucucaauaccaugugaauuaguuaaauuacauggcaauugggaaauaaaguugcag

SEQ ID NO: 54889 - RNA, 60 nt, Homo sapiens
cugcuuuuucuaggaggacaauuauauuuuugauuaauauuguaauuuuagagaaagugg

SEQ ID NO: 54890 - RNA, 61 nt, Homo sapiens
cuggaagguaauugucagcucauagcuuaagcugugggacuguucauuugccuugacccag

SEQ ID NO: 54891 - RNA, 62 nt, Homo sapiens
cuggaaugucagcuacaagagggcagggacuguggcuauuuuguucucugcuacauucucag

SEQ ID NO: 54892 - RNA, 85 nt, Homo sapiens
cuggacaaaagaucucugagaaauuucuuugugaugugcgcauucaucucacagaguugaacuuucuuuugauugagcaguccgg

SEQ ID NO: 54893 - RNA, 113 nt, Homo sapiens
cugccuuuggggcuccaguccaugccucaggugucacauggcacugcgggcuucuugguugccaagaggcagaccacaggccaucuuggggaggacuuuauauucaagugcag

SEQ ID NO: 54894 - RNA, 84 nt, Homo sapiens
cugcauucccuguccugcugugaggugugaccaccugauggccccauuccaguguguucauccucagagaugucaagaaagcag

SEQ ID NO: 54895 - RNA, 63 nt, Homo sapiens
cugcauuugcacugagacucagcuuccaguucagugaggacagccgggcuaguguagaugcgg

SEQ ID NO: 54896 - RNA, 95 nt, Homo sapiens
cugcuaacaguauauugaacagugcauuccuguccauauucuagacacuccuaaagcauuggcagggaugcauuacguggcaauaauuauagcag

SEQ ID NO: 54897 - RNA, 97 nt, Homo sapiens
cuggcccuuccugccauacccagcugcagucaucuucuagaaagcuucccccugcugcuucuggaaaucagcagagggugggcaagggggaagucag

SEQ ID NO: 54898 - RNA, 129 nt, Homo sapiens
cuggcugagaccugucaccauuugaguuugugaacucugaucuacguaugaaguucuacuggcuccgaggagcugugauucuguguagauagucuugcauacugcuaaaauagguuuuuuacuuuccag

SEQ ID NO: 54899 - RNA, 110 nt, Homo sapiens
cugggaagaccuuuccgucggucugucagucugucccugccuggcgggcuuucucugggaaccgcugcagacgcgcuggcgaaagcaccaccgccaagagucaugcucag

SEQ ID NO: 54900 - RNA, 91 nt, Homo sapiens
cugggagaugcuaugguguuauuuuugcacuacaagggcucugaagacugccaggcuugaagugaagaacaauaucaccugccuaucccag

SEQ ID NO: 54901 - RNA, 82 nt, Homo sapiens
cuggggcuuuuuggaggagguuagaucaugaggaaggaggcuucauaaauaugauuuaauguccuuauaaaagacaucccag

SEQ ID NO: 54902 - RNA, 83 nt, Homo sapiens
cugggugggcaucugcugggugcgcuccuguuaugcuuucugcugugacagagaagcauugaguucaguuuaaugucccccag

SEQ ID NO: 54903 - RNA, 83 nt, Homo sapiens
cugguaagucuuguaggcaguuucaugagguaguuaaugauguccaguguaugaaauugcuaucgcaguacuauuacugccag

SEQ ID NO: 54904 - RNA, 70 nt, Homo sapiens
cugggcuauguaggaguggaguuuucaacacacaauuuucaaauggguaauugcacuaagcauaguccag

SEQ ID NO: 54905 - RNA, 69 nt, Homo sapiens
cuggggauggggaagcuguuucuucugguaagaaaguuucaucagaguuuacaagcucaguguccccag

SEQ ID NO: 54906 - RNA, 64 nt, Homo sapiens
cuggucaaccuugugugaaggcaaguccugcauugccuaacaggcaauauugccuucagacuag

SEQ ID NO: 54907 - RNA, 109 nt, Homo sapiens
cugguccugccuggagccugucuacagugauaggugauagguuugugcaguguguucauugcugcaaacaggcaucugugggggcagccugcagggaggauugaaccag

SEQ ID NO: 54908 - RNA, 110 nt, Homo sapiens
cuggagaaacuggggcaguugagcaacaucugagaucaaggcaaaacaaaaugcuugguaaacuuccccucaugaaugaguucuuggcugguacuccuuauuuuuuccag

SEQ ID NO: 54909 - RNA, 66 nt, Homo sapiens
cuggaggggaccuugggacaagggcuucuuugguagcccuggccagguucacaggcuuccuuucag

SEQ ID NO: 54910 - RNA, 55 nt, Homo sapiens
cuggagugagaacuucaaugauggccauuaggccaauuggauggucuuuuuccgg

SEQ ID NO: 54911 - RNA, 57 nt, Homo sapiens
cuggauauguugcaacauuucccacuaauuacuuggugacuggugucagauguccag

SEQ ID NO: 54912 - RNA, 74 nt, Homo sapiens
cuggauauuucccauuucccccaaaugcagccugguaaccacuguauuuguuguuaaauggagaggauuucuag

SEQ ID NO: 54913 - RNA, 55 nt, Homo sapiens
cuggaucuuguccaagaccauuaaggcaguaccacuaugagucugcaagaaccag

SEQ ID NO: 54914 - RNA, 62 nt, Homo sapiens
cuggaugucaaagaggaaaacuggauguccuucuccagaagcggucaucaaguuccuccuag

SEQ ID NO: 54915 - RNA, 61 nt, Homo sapiens
cuggcaagaggauaaaguccuaacuccuuaucauggaguccaaacuauaucuacuuuccag

SEQ ID NO: 54916 - RNA, 78 nt, Homo sapiens
cugcucgggcccuagcuucuagaacucuuuucagcucugcucugcugagcucagagugcaaagguuggggcuggacag

SEQ ID NO: 54917 - RNA, 76 nt, Homo sapiens
cuggcauguguauucauguugaauagacaguucuauucaauagaacuguccauucagcaugaacaagauugaccag

SEQ ID NO: 54918 - RNA, 79 nt, Homo sapiens
cuguuuaaaucugccauucugaucuaaugaaucuacagucacuauuuagauuauuggcugauuugauccaccugugcag

SEQ ID NO: 54919 - RNA, 88 nt, Homo sapiens
cuguuuuucauuugcuugacugauuuaucuccauuuccuuauuuugagccuauggaguguaaauuaguucagccauugggaaaagcag

SEQ ID NO: 54920 - RNA, 66 nt, Homo sapiens
cuuaacagugguauugaugaccauuaauccuucaaccuaaaccugcucauuaaugcugccuuuaag

SEQ ID NO: 54921 - RNA, 57 nt, Homo sapiens
cuuacagauggauggcagcuggcucuucaccagaugcccaaguugucauuuuguaag

SEQ ID NO: 54922 - RNA, 90 nt, Homo sapiens
cuguggguagauacccaguggugagauugcuggaucaaaugguaguucuacuuuuaguucauuaaggaaucuccccacuuuuuuccauag

SEQ ID NO: 54923 - RNA, 95 nt, Homo sapiens
cuguuauuaauuaauugauugauuuugaggcagggucuuacucucauauauuuuuucuuggcugauauuauuuaauguaauugauugauugacag

SEQ ID NO: 54924 - RNA, 81 nt, Homo sapiens
cuguugaugagaauguaaguuaaugaaaucauuuauauauauguauuuuuuuagggacuugcuccuuauugccaccuacag

SEQ ID NO: 54925 - RNA, 70 nt, Homo sapiens
cuguugcccaggcuggagugcaguggugcaaucuugguucgcugcgaccuccaccucccggguucaacag

SEQ ID NO: 54926 - RNA, 68 nt, Homo sapiens
cuguugccuaggcuggagugcaguggcaugaucucggcucacugcaaccucugccucccagguucaag

SEQ ID NO: 54927 - RNA, 83 nt, Homo sapiens
cuguugcuuauuacauccauaggcucugcuucuacuaacguccuugaaccuuggagcagagccuauggagguauuaaggacag

SEQ ID NO: 54928 - RNA, 72 nt, Homo sapiens
cuguugcuuuggcaaugucauuuucaaucauacaggaguauguguuguugaucguaacauuguagagcacag

SEQ ID NO: 54929 - RNA, 79 nt, Homo sapiens
cuguuggcaauauuuacugaaguugaaaauaugcauguucucucaccaccaguucuacuuccaguuauauagccagcag

SEQ ID NO: 54930 - RNA, 79 nt, Homo sapiens
cugugcaaaaauaaguugcuguuggucaaaccauccgauuuaugguauuugauuauagcaugcuuaggaacuaacacag

SEQ ID NO: 54931 - RNA, 65 nt, Homo sapiens
cugugcuugagagaugacacagguaccucacugaguguuacuguagugguucuccagguggacag

SEQ ID NO: 54932 - RNA, 75 nt, Homo sapiens
cuguggacaacaggaguuuuguuagugcucuucagggucccggagaucauguacuagaacaccuuuccuccacag

SEQ ID NO: 54933 - RNA, 86 nt, Homo sapiens
cuguagccuuguaguauaguuugaagucagguagugugaugccuccagcuuuguucuuuuggcuuaagauugucuuggcaaugcgg

SEQ ID NO: 54934 - RNA, 68 nt, Homo sapiens
cuguagucucagacuuuugggcucaaagcauccuccaacaucagcuucucaaaguacugauauuacag

SEQ ID NO: 54935 - RNA, 68 nt, Homo sapiens
cuguagucucagcuacuugggaagcugaggugggaggaucacuucagcccaggagguugaggcugcag

SEQ ID NO: 54936 - RNA, 65 nt, Homo sapiens
cugucagacacugagcaaacgacuagcucgagcgaguucagucucaaccuuaguuucugccacag

SEQ ID NO: 54937 - RNA, 63 nt, Homo sapiens
cugucuuugggacuggaaggaguaaggguuuccuuccuuauagcacuagauuuuaaacgacag

SEQ ID NO: 54938 - RNA, 69 nt, Homo sapiens
cugugaacauuuuguauauauuauucugcaauuccauuaauagguaaaaugugcaaacauguucuauag

SEQ ID NO: 54939 - RNA, 62 nt, Homo sapiens
cugguguuugagaagcugaugucaggacaugauggagcuuggcugcagcauccgaggaccag

SEQ ID NO: 54940 - RNA, 73 nt, Homo sapiens
cuggucuggagagugauaaguaaauggagaaauaaucaguuuuacucuagaacuagaucaccucaacagucag

SEQ ID NO: 54941 - RNA, 98 nt, Homo sapiens
cuggugacauuaaaucagucuuucaucuggcgaaugugaagagugccuaauauguaggaggcauuguucuagguccuaggauguaagagaugaaccag

SEQ ID NO: 54942 - RNA, 60 nt, Homo sapiens
cugguucuuauugccuuauauauuuuuuugaauggaaugagaacugucaaugagagcuag

SEQ ID NO: 54943 - RNA, 59 nt, Homo sapiens
cugguuuguaaaguuccugagauuucaauaaugggcucucacaaaccaguauaggccag

SEQ ID NO: 54944 - RNA, 68 nt, Homo sapiens
cuguaaccuccaccuccuggguucaaaugauuauccugccucagccacccauguaggugggauuacag

SEQ ID NO: 54945 - RNA, 55 nt, Homo sapiens
cguuuugaucagugauggaccgcauauacaaugguggucccauaagauuauaaug

SEQ ID NO: 54946 - RNA, 74 nt, Homo sapiens
cguuuuuaugacugaguagcauuccauuauauuuauauuuauaauggaauaauacucagccauauaaaggaaug

SEQ ID NO: 54947 - RNA, 98 nt, Homo sapiens
cuaaacauaauuaaaugguagagcuuauuuucaaguuuugcuuauuuuuauauguaaagcuuggauuuaggcuaauaaaaaucaggaaauuuguuuag

SEQ ID NO: 54948 - RNA, 61 nt, Homo sapiens
cuaaacugucuugcaguuacaugugcauguguauauguuuaugugaguaagagaguuuuag

SEQ ID NO: 54949 - RNA, 56 nt, Homo sapiens
cuaagauggagucuugcucugucaccccuggcuggagugcaauggcaccaucuugg

SEQ ID NO: 54950 - RNA, 72 nt, Homo sapiens
cuaauuugguuauaguguaucuugaguaaaucaccucaaugagaauuuuagguuacauauaauccaaauuag

SEQ ID NO: 54951 - RNA, 65 nt, Homo sapiens
cuacaguaugaaaccuuuacucucuauacuaugcaugauauaauggaugagggguucguauguag

SEQ ID NO: 54952 - RNA, 72 nt, Homo sapiens
cuaccugugaagauguuucuuaauugacuuaaccaaaaucuuauugauuaauuuguauacaucuuuggguag

SEQ ID NO: 54953 - RNA, 57 nt, Homo sapiens
cuacgguuuguauaacuccucauguuccauuacaugugcagauguuacaaauuguag

SEQ ID NO: 54954 - RNA, 69 nt, Homo sapiens
cuacuguugugcgcgcuugggcuaucuucaaguccugccuauuucaaaugguccacgugaacauuguag

SEQ ID NO: 54955 - RNA, 60 nt, Homo sapiens
cuagacacugacguuccuccgagaguagaggcguggcucucaggggcaggaugugucugg

SEQ ID NO: 54956 - RNA, 130 nt, Homo sapiens
cucaaaauuucuuugacuacuugggcccuuuuguaguuccacacagauuuuaugauuuuuaaaauauuucuuugaggaaugucauuuguguuuugacagggauugcaucaaauguguagauucuuuuggg

SEQ ID NO: 54957 - RNA, 65 nt, Homo sapiens
cucacaaguuaguauugguuuugggaaguugcuuugcuuuugauguugauacuaccuucagugag

SEQ ID NO: 54958 - RNA, 65 nt, Homo sapiens
cucacaauucagacaugugugcauuagauuaacuaguaugaugacauugucacagucugagugag

SEQ ID NO: 54959 - RNA, 58 nt, Homo sapiens
cucacacugucuucauuacuguagcuuuguaauaggcuauaaaaucaggcagugugag

SEQ ID NO: 54960 - RNA, 80 nt, Homo sapiens
cucacaguugcacauggcuggggaggccucacaaucauggcagaaggcuaaaggcacuuccuacauggcggcugcaagag

SEQ ID NO: 54961 - RNA, 59 nt, Homo sapiens
cucaccucaggugaucuggcuaccucugccucccaaagugcuaggauuaccugggggag

SEQ ID NO: 54962 - RNA, 126 nt, Homo sapiens
cucacgucucaagauccaagcuucccaaaguaaagacucaugucccuuuuauaagggcuuacaacucuaagggguccaugugaaaaggucgugauacauugcacaagugggggcuaugugacugag

SEQ ID NO: 54963 - RNA, 55 nt, Homo sapiens
cucacuaggaaguaaaguuuguaagcccaaggccaauaugcuaauuuuuaguggg

SEQ ID NO: 54964 - RNA, 101 nt, Homo sapiens
cucagacuccagcaugcaucagaaucaccuggaggugaucacuuguuaaaaugcgcaucgcugggucccaccuccagaguuucucaugcuggaagucuggg

SEQ ID NO: 54965 - RNA, 82 nt, Homo sapiens
cucagaguguggcuucauguaauauuucacagcuuuccaugcagguucagaaggcugucauuugcaugaauccacuucugag

SEQ ID NO: 54966 - RNA, 74 nt, Homo sapiens
cucagccauuagaaguagagguagagugacuuccccagcugugugaccuugggaagucacucuaccucucugag

SEQ ID NO: 54967 - RNA, 130 nt, Homo sapiens
cucagccucucaaagugcugggauuacagguaugagacacugaauccggccugauggauuguuuuuaaaacugaaacucagcugggcaugguggcucacgccuguaaucccagcacuuugggaggcugag

SEQ ID NO: 54968 - RNA, 60 nt, Homo sapiens
cucagggacaguaucauuuaggagaauauguuuuuauugcccuaaauugcuucaccugag

SEQ ID NO: 54969 - RNA, 88 nt, Homo sapiens
cucagguauuucuuuauaacaaugcaagaauggccuaauacguaaaauuaguaccuaggaguggagcacuguuauaaagauuccugag

SEQ ID NO: 54970 - RNA, 76 nt, Homo sapiens
cucaucacaaauaucaagguacauacuaucaacgugacuuaccacugcugauguugaccuugaucaccugggugag

SEQ ID NO: 54971 - RNA, 62 nt, Homo sapiens
cucaucauaacucugaaaacucuacuuccaaauugcacucugaguuucaggguggacaugag

SEQ ID NO: 54972 - RNA, 60 nt, Homo sapiens
cucaugcacugaguccaccucuggacucugugggggccagaggaccgguuuagucaugag

SEQ ID NO: 54973 - RNA, 58 nt, Homo sapiens
cucauuugggagauaauacaugcccacagcacaggguauuguauguaaaccaaaugag

SEQ ID NO: 54974 - RNA, 78 nt, Homo sapiens
cucccucuggguucccugaagauacagaguuugggggugagaggcccgccagacugcacuuuuuaggcuaggcgggag

SEQ ID NO: 54975 - RNA, 129 nt, Homo sapiens
cuccugaucucaggugaucagccugccucggccucccaaagugcugggauuaggccaggcgcaguggcucaugccuguaaucccaguacuuugggaggccgaggcgggcagaucaccugaggucaggag

SEQ ID NO: 54976 - RNA, 86 nt, Homo sapiens
cuccugcugggacccgggaggacaaauaggugcagccccccuagaaugguugagccaaggauugucuuuccugguuccugaaggag

SEQ ID NO: 54977 - RNA, 61 nt, Homo sapiens
cuccuggcuuggaggaaugugagggcuuugcucaaagccccaagcacuucaggcucagggg

SEQ ID NO: 54978 - RNA, 58 nt, Homo sapiens
cuagcaguauaugagagcuauuguuacucuaaaccauaacaacucuugauacuguuag

SEQ ID NO: 54979 - RNA, 95 nt, Homo sapiens
cuagcuuuguauauauacuucauguuagugaaauccugcaguacuagucuguuuguaacuggcuuauuucacuuagcauaaguccucaagguuag

SEQ ID NO: 54980 - RNA, 110 nt, Homo sapiens
cuaguuguguuugagugccauuagaauguaaauuccaagggcaggacauuucugccuguuuuguuucugcuuuuguuuguuauauucccagcaccuaaaaccacaccuag

SEQ ID NO: 54981 - RNA, 66 nt, Homo sapiens
cuauaauacugaaaguauuuucaaaucuaggaugaccaggauagaggaauuguucaguguucauag

SEQ ID NO: 54982 - RNA, 80 nt, Homo sapiens
cuauaaucccaguguucuggaaggcugaguuaggagaaucacuugaggccaggauuucaagaacacccugggcaacauag

SEQ ID NO: 54983 - RNA, 129 nt, Homo sapiens
cuauauagacguuguacaugccggauuuauuuugaggcgaacgcaaucauuuugaaaugccuaguuuucaaaguaaaaauguguucacguuacaaaaccacuguagcaagacauuucuauuaaaaauag

SEQ ID NO: 54984 - RNA, 79 nt, Homo sapiens
cuauauuuauacuacuauaaagagguaguuguagcaaucugguccuaaauuauugaucucuauaguaguauagagguag

SEQ ID NO: 54985 - RNA, 74 nt, Homo sapiens
cuaucguaaugcacauauauuuccuuauucugccauaauaaguagaaucaacaggaugugcauuguaaagguag

SEQ ID NO: 54986 - RNA, 66 nt, Homo sapiens
cuaugagucugcagaucuauuaaggggcccaccaaguacaccucuauggaauuccagacuauauag

SEQ ID NO: 54987 - RNA, 99 nt, Homo sapiens
cuaugcugugcuggacuucugaucuacagaacugugaacuaaaaaagucgauguuguuuuaaagcacggaguuuguggcaguuuuuuacauagcaauag

SEQ ID NO: 54988 - RNA, 76 nt, Homo sapiens
cuauggaugccuuucuaggaauacacuuuccgggguuccuuuuuucccugagaugugaauuucagagcuuccaaag

SEQ ID NO: 54989 - RNA, 116 nt, Homo sapiens
cuaugugauagcuuuaagguuggugcaaaagugauugcgguuuuugccauuacuuucgauggcaaaaccugcaauuacuuuugcagcaacuuaauaaauaacaaagaaacauguag

SEQ ID NO: 54990 - RNA, 64 nt, Homo sapiens
cuccacuccuuucaugaagucuuccucacaagaguagaauaauauuuucaauguaaggauggag

SEQ ID NO: 54991 - RNA, 76 nt, Homo sapiens
cuccagcaucuagcaauuguccucuucccucacuguguuaggucucggggaggucauuguucaaugcuguuccgag

SEQ ID NO: 54992 - RNA, 65 nt, Homo sapiens
cuccaggacacugauguaugcugugggcuggugcagcccagggcacagcagucaguuccauggag

SEQ ID NO: 54993 - RNA, 62 nt, Homo sapiens
cuccagggauucagauaucaauauaccacaguucguucuuucuggaguuugaguucuuggag

SEQ ID NO: 54994 - RNA, 55 nt, Homo sapiens
cucccaggcuacaggaucuuugacugagcucucaguggauguuguggccugggag

SEQ ID NO: 54995 - RNA, 83 nt, Homo sapiens
cucccaugacccaggauuccaguuugugagaagcugugccaugugcaaugguuaacauuccagauuggagccugacacgggag

SEQ ID NO: 54996 - RNA, 67 nt, Homo sapiens
cgucaguuuacuguugccauggcaacacugggacguuacagucccuuuccauggcaaugaucugaug

SEQ ID NO: 54997 - RNA, 72 nt, Homo sapiens
cgugaauuaugguaucucauuuuggauuugaaauguauuucugaaucacagauuaugaguaucuguuucaug

SEQ ID NO: 54998 - RNA, 85 nt, Homo sapiens
cguguuagacacggugggcucguucguguuagacacgguggacucguucguguuagacacggugggcucguucguguuagacacg

SEQ ID NO: 54999 - RNA, 77 nt, Homo sapiens
cguuagccuuccucugauuuacauucaacucugaucccugggccuuagguuugacauggagguggaggaagauagcg

SEQ ID NO: 55000 - RNA, 77 nt, Homo sapiens
cccuuagcacagugcgugguacauaauuagugcucaauaaauguuagcucuuguuaguauuagcaguugugcagggg

SEQ ID NO: 55001 - RNA, 66 nt, Homo sapiens
ccgauuuaugucucugacuugauuuauggaaauaauacuaguuguugcaucagcaggcauaauugg

SEQ ID NO: 55002 - RNA, 56 nt, Homo sapiens
cccgggagguggaaguugcagugagcccagauugugccauugcacaccagccuggg

SEQ ID NO: 55003 - RNA, 56 nt, Homo sapiens
cccgggagguggagguugcaaugagccaaaaucaugccauugcacaccagccuggg

SEQ ID NO: 55004 - RNA, 67 nt, Homo sapiens
cccgaguaccugagauuacaggugcuggccacaccuggcuaauuuuuguaguuuuaguagagauggg

SEQ ID NO: 55005 - RNA, 61 nt, Homo sapiens
cccucuacagggaagcgcuuucuguugucugaaagaaaagaaagugcuuccuuuuagaggg

SEQ ID NO: 55006 - RNA, 104 nt, Homo sapiens
cccucugggcgacuccggcucaucgauuccggcccagaggagcgcccccgggcgccgaggaugggcggagacgugcagccgccccugagaggucgcccagaggg

SEQ ID NO: 55007 - RNA, 63 nt, Homo sapiens
cccucuucuacauucuugagcugaccuagaauuaggguucccccuuuggcaaugagaacaggg

SEQ ID NO: 55008 - RNA, 69 nt, Homo sapiens
cccugauuuaaaguguaugggaggguaugcauagguuauaugcaaaugcuacaccauuuuguauuaggg

SEQ ID NO: 55009 - RNA, 59 nt, Homo sapiens
cccucaccaagggucccaaggaauaccaaacggucauuccuuaggcccuuugguuaggg

SEQ ID NO: 55010 - RNA, 69 nt, Homo sapiens
cccucauuguaacacaugcugcucucuggugggcaauguugaaaaccagggagcuggcauguguggggg

SEQ ID NO: 55011 - RNA, 88 nt, Homo sapiens
cccuuuagugagguuggaaaaguuuucuuggacaauauucugagauauguuuuccaagaugcuuacuuucuccgcaucucuuccgggg

SEQ ID NO: 55012 - RNA, 97 nt, Homo sapiens
cccuuuauuugaaagaacuagaauguuuucauuauccuaacuguauccugacagauaucagagguauugcaaaagccuagauuccaaguacaaaggg

SEQ ID NO: 55013 - RNA, 109 nt, Homo sapiens
cccuuugcauuuacauuuuucauauuguccuuuaaugugcagugaucauugauuguccauugauacugugcauuagaggcuaucuggaaauuguuguauguagauaggg

SEQ ID NO: 55014 - RNA, 74 nt, Homo sapiens
cccuuuuaugacuauugcacuuuccugguacagaugagggcuucuacuaggaagguggcagugaggagggaggg

SEQ ID NO: 55015 - RNA, 78 nt, Homo sapiens
ccgguaugaggaaugaucauauguuucagguuaaauguagcaagcaguuugacuuuuagaauaugaguuuccagccgg

SEQ ID NO: 55016 - RNA, 64 nt, Homo sapiens
ccgggcacagaguugugagggaacgugggauauccaaagguucuaaguaauuuugcaugccugg

SEQ ID NO: 55017 - RNA, 66 nt, Homo sapiens
ccggcagcaguguuguggagucuauugugagggacaaacucucagaaccuccuagcaguguucugg

SEQ ID NO: 55018 - RNA, 76 nt, Homo sapiens
ccugacuccuauggaaaggggcaauaagaagcauaaauucuugucauagguauugcacuuuuccauaggagucagg

SEQ ID NO: 55019 - RNA, 66 nt, Homo sapiens
ccugacucugauuucgcugcauaacucccaggggcauccugcucugaugucaggaagggagucagg

SEQ ID NO: 55020 - RNA, 84 nt, Homo sapiens
ccugacuuuuuaaugauugccauucuaacuggugugagaugguaucucacugugguuuugaugugcauuucucugauggccagg

SEQ ID NO: 55021 - RNA, 73 nt, Homo sapiens
ccugagaacugagauaagugauauucuuuucuauuuuguaaauucaaguaguauugauuucuuagauuucggg

SEQ ID NO: 55022 - RNA, 67 nt, Homo sapiens
ccugaggaaauuguaaugacuucacuugaggcagcugccuuggaagacaaugcugauucucuucagg

SEQ ID NO: 55023 - RNA, 64 nt, Homo sapiens
ccuaccucuuuguaauaagaauugaggcaaauuugucaucaaaugcucuuugcagagagguagg

SEQ ID NO: 55024 - RNA, 129 nt, Homo sapiens
ccugauuuauuuauucaacaaguauguaccuucccaggcauuagucaaguguacugugaaugaaaaagacaaaaaucccuauuauccagagcuuacuuuuuagcuaggggagguagauaauaaaugagg

SEQ ID NO: 55025 - RNA, 67 nt, Homo sapiens
ccuggaucaugugucucagcccagaccuauuugugugucuuaacguaaagcugugacugaugcuagg

SEQ ID NO: 55026 - RNA, 79 nt, Homo sapiens
ccuggguguauucauuggccugaucaacacaaugaccaaaucuggucacagugcaggaucaguuaaugacuguccuagg

SEQ ID NO: 55027 - RNA, 112 nt, Homo sapiens
ccuggugucugagggguuuuguccacagcuuguccugcuacauuucuugguucucugacugggaagcgaggugauuagcagacagucaaggcagccccuuagguggcucagg

SEQ ID NO: 55028 - RNA, 69 nt, Homo sapiens
ccugguuaucacuguuguuuguuuaaggcuuuaggccucuacaaugagcaagugguaaaauaaaccagg

SEQ ID NO: 55029 - RNA, 125 nt, Homo sapiens
ccugguucaugucauucuccuuccucagccucccaguuagcugagacuacaguaggugccagccacgcugccuggcuaauuuuuuguauucuuaguagggacgagguuucacuguguuugccagg

SEQ ID NO: 55030 - RNA, 63 nt, Homo sapiens
ccuaaugacauugaugcucuggcugggagggcucagucccggagggggugucaaguugauagg

SEQ ID NO: 55031 - RNA, 121 nt, Homo sapiens
ccuagaccuaaagggaacuuugaaagaaaggagacugaguucauuuacaaaggguuaaaagagugauauuuaagcugugucugaagauuuuuuuuaaagauucuacaagaucuuggcuagg

SEQ ID NO: 55032 - RNA, 66 nt, Homo sapiens
ccuagcuggaguuuuuguuauaggauauuguguggcagagccugggacaugagcucgagaccuggg

SEQ ID NO: 55033 - RNA, 129 nt, Homo sapiens
ccuaggcuuccuccaacagauuuugccauuugacucugaugaguguuccuuuguccagucuaagacaauaucuacucaauugcagucaccuggccagcaaaaaucuccuagccgaaguaucaccuuuug

SEQ ID NO: 55034 - RNA, 62 nt, Homo sapiens
ccuauuagacacaacaacauauaaguacagauuaagauguuaagaugugcuguguuguuagg

SEQ ID NO: 55035 - RNA, 74 nt, Homo sapiens
ccuauugcauccauucuagacucaucuaaaccacccauugcuggucaagagaggucuaaaaugguugugguagg

SEQ ID NO: 55036 - RNA, 70 nt, Homo sapiens
ccuauuucaugagagaccuacagcuuauuaccuugcuguguggaaugaaaacucucucacaaagaauagg

SEQ ID NO: 55037 - RNA, 55 nt, Homo sapiens
ccucaaagucaagggaaagcaggucaaaugauuuuguuuagcgcugacauugagg

SEQ ID NO: 55038 - RNA, 61 nt, Homo sapiens
ccucagauguguaucuguacauuauuuuucuuaaugauauugaacacuuucauaugugagg

SEQ ID NO: 55039 - RNA, 129 nt, Homo sapiens
ccuccacuccccuuuccagagggggccaugguuaacaguguguguguucaccuagaccguuuaugcaucuguagacacacacacagugaagugugguuuucgucguuuugguggggagguugguuucug

SEQ ID NO: 55040 - RNA, 81 nt, Homo sapiens
ccuccgaugcugcuuugguagaaaucuuugguuuggagucagacacuuuggugccaagacagguuuuuauaaguuaggagg

SEQ ID NO: 55041 - RNA, 62 nt, Homo sapiens
ccucucagguccuuacugugcucccuccgcagaugagaaggagacgccagggccuggggagg

SEQ ID NO: 55042 - RNA, 56 nt, Homo sapiens
ccucucuugaaagacuccuuuggugaccagugggucacaguccuguuuaggagagg

SEQ ID NO: 55043 - RNA, 89 nt, Homo sapiens
ccucugcugagaugauguucaggcucaugguggcuucaggauuaucauaagcacccuuugucuggacauguccugaaacucagcagagg

SEQ ID NO: 55044 - RNA, 66 nt, Homo sapiens
ccucugugcacauuguuuaugucuguuggacaauuuuccagcaauaccccauguugcacaugaagg

SEQ ID NO: 55045 - RNA, 119 nt, Homo sapiens
ccucuguggaaaugaguaaugcugccuuaccuacuuaccacaugucaucuuguauccuuguuaagaguagggcccauggaaguaaucaugagguagcacauaccauauuaccacugagg

SEQ ID NO: 55046 - RNA, 57 nt, Homo sapiens
ccuuucuagauagaugaaacccauauggagaggaaauagugacaucauuuagaaagg

SEQ ID NO: 55047 - RNA, 63 nt, Homo sapiens
ccuuuuaaaauauugguggccaggugugguggcuuacgccuguaauaucagcauuuugggagg

SEQ ID NO: 55048 - RNA, 62 nt, Homo sapiens
ccuucauacaaagaaaaaucaggugagcgaucacaguaccugguuuuaacauuguauuaagg

SEQ ID NO: 55049 - RNA, 63 nt, Homo sapiens
ccuucauagucacauucgaugucuccuacaaggccacccugggagacaggaugcuuaugaggg

SEQ ID NO: 55050 - RNA, 68 nt, Homo sapiens
cgaaacuacuuugugauuugugcauucaacucacagaguugaaccauucuuuugauagagcaguuuug

SEQ ID NO: 55051 - RNA, 68 nt, Homo sapiens
ccuucccacccgcccagguguggccgggacagcaccgcaguuguggcgccccugggugggcaggaggg

SEQ ID NO: 55052 - RNA, 92 nt, Homo sapiens
ccuguaguacacagaguaggcuagguguguuuucagaaguccuagaugcuuuggaauguacucuagccuaugcuuugguuugguaaugcagg

SEQ ID NO: 55053 - RNA, 60 nt, Homo sapiens
ccugucacuguggagaagaaaguggggcugauccuccccuugacuccagggugacccagg

SEQ ID NO: 55054 - RNA, 88 nt, Homo sapiens
ccugugaaaagcagaagucacagaugucucucagaagacgugaaauccaccagagagugacacugucuucugcucuuaaauccacagg

SEQ ID NO: 55055 - RNA, 58 nt, Homo sapiens
ccugugaugaagaguccaagaacagccugagauaaggaugucauucuucuuucacagg

SEQ ID NO: 55056 - RNA, 76 nt, Homo sapiens
ccuuacuaguguuggauuuuaacaaacuaggugagaagaagccucagcuaguugauaaaauucauuuguaaugagg

SEQ ID NO: 55057 - RNA, 71 nt, Homo sapiens
ccuucucugcuucaggguacuuguggccaaaguuagauguuuaacuaaccacuuuacaccuggugagaagg

SEQ ID NO: 55058 - RNA, 96 nt, Homo sapiens
ccuuggaaccuccuaugugcugcaucuuuggauggaaauuggagucccagagacaaaugaggcuccacccugcuuccagaagcucagaguccaggg

SEQ ID NO: 55059 - RNA, 84 nt, Homo sapiens
ccuuggccucccaaagugcugagauuguaggcaugagccacuugcccagccugcacagaacuuuuaauaauggaagcuuuaagg

SEQ ID NO: 55060 - RNA, 67 nt, Homo sapiens
ccuuggucucaucaagagcagcuuuguaguucucugagcuguggggucucuaggcugagaacugagg

SEQ ID NO: 55061 - RNA, 95 nt, Homo sapiens
ccuuguacuugugugcuguagcuguaauuuuauuugccauuuuauauaacaaaugcagagaaaucuaaaauauggagaugaacaacaggauaagg

SEQ ID NO: 55062 - RNA, 73 nt, Homo sapiens
cgaagcuggauuuaguguggagcaaaauuucauauacaugcuugcacugcugcacacuauguuuacuguuuug

SEQ ID NO: 55063 - RNA, 77 nt, Homo sapiens
cgagcugugaaacccuaagaagaagggagcugaaccagugauugugaaacagcaucauucaucugggguaauacucg

SEQ ID NO: 55064 - RNA, 63 nt, Homo sapiens
cgauaaguauuuggacuuuacugugaguaagaggagccacugagaguguuaaauacuuaauug

SEQ ID NO: 55065 - RNA, 56 nt, Homo sapiens
cgccuauuacuuuuuuuccaauuucaauuaggaacauggaaguaagaauauaggug

SEQ ID NO: 55066 - RNA, 71 nt, Homo sapiens
cgcucucuugccuaggcuggagugcaguggugcgaucucggcucacugcaaucuccucccagguucaagcg

SEQ ID NO: 55067 - RNA, 63 nt, Homo sapiens
cgcugcuuuuaagaacuguaacacucacugcaagggucuguggguucauucuugaagucagug

SEQ ID NO: 55068 - RNA, 67 nt, Homo sapiens
cggugaggcaaugaggcggaccagcagguucccggggaucucugcagccccguugccauaacaaccg

SEQ ID NO: 55069 - RNA, 59 nt, Homo sapiens
cggggacacacuggcagcuccuaccaauuagugaccuaacccugccagugugcucuccg

SEQ ID NO: 55070 - RNA, 127 nt, Homo sapiens
cgggaccgccuaacuuagaaucucugaugcuguaggcuaggcgucaguauuuuaaauuuucacacucauaagguugagaucaacugagucagagcauuagcauuagauuaugagaacccgguaucug

SEQ ID NO: 55071 - RNA, 122 nt, Homo sapiens
gcagaaauauauccuggcaucaucacuuucaauagcuggauguauguuaagugaaucauugccaccccagagguggauuuccuucuauauauauuuuaaugaacucgagucaggauuuuugc

SEQ ID NO: 55072 - RNA, 64 nt, Homo sapiens
gcacugcuuaguaaugggaccgguucugagaaauguguuuucagaccauuucauuacagacugc

SEQ ID NO: 55073 - RNA, 62 nt, Homo sapiens
gcagaggcaguugaaugaugcguuugguggguggcagcaaaugcauaucaagauugcccugu

SEQ ID NO: 55074 - RNA, 67 nt, Homo sapiens
gcacuugcauucauugaaaacacacagauagaccuucacaucucacagaguuucagaguggaagugu

SEQ ID NO: 55075 - RNA, 129 nt, Homo sapiens
gcagaguguaauucccagcuccuugacuuagacuuggccauaugacuugcuuuggccaaugguauguggccgaaguaaaagugugcuaguucugagccacaucauucauuucuacuugcugucuugugc

SEQ ID NO: 55076 - RNA, 67 nt, Homo sapiens
gcaaggauagcagccauucuuuuuauuuguuaaaugucuuuuaagugggagaauaucugcuaugugc

SEQ ID NO: 55077 - RNA, 76 nt, Homo sapiens
gcaccuagaacaaugccuggcacauaguagacacccaauaaauacuuacugacaugaucaggcauguucagggugu

SEQ ID NO: 55078 - RNA, 71 nt, Homo sapiens
gcaggauuuccuucuuuuguaaggcugaauauugcauuuaaauauauaccacgcagaaggagaaauacugc

SEQ ID NO: 55079 - RNA, 63 nt, Homo sapiens
gcaggcaccaugagcaucauggguacaaaaggaguccaauuucaagugcaucguugugucugc

SEQ ID NO: 55080 - RNA, 78 nt, Homo sapiens
gcagccauuguucuauccaaauuggguaucuguuaaccauuugaaagguauagguucuggaggcuuaacaauggcugc

SEQ ID NO: 55081 - RNA, 92 nt, Homo sapiens
gcaggagaauugcuggaaccugggagguggaggcugcagugagccgagaucacuccauugcacuccagcccaggugacaacagugagacugc

SEQ ID NO: 55082 - RNA, 58 nt, Homo sapiens
gcaggaguaaauuugcugaacucaaggcacugccuagagaaguaaauauuaucucugu

SEQ ID NO: 55083 - RNA, 78 nt, Homo sapiens
gcagaugcucaguggguguaauuuucucucucuuccuauuugugagucgacaugaaaacugcuucucuggguuucugc

SEQ ID NO: 55084 - RNA, 107 nt, Homo sapiens
gcagaugucuacaacuccaaggacacaugcauuggucuauuaugugaaaaaguaauccauuucuauuacauuaagccaauggauucuugaguuugauuuauuacugc

SEQ ID NO: 55085 - RNA, 64 nt, Homo sapiens
gcagauuaaguggauuuaaaugucugguccauagcaaugucagcaccuuuccuccacuaucugc

SEQ ID NO: 55086 - RNA, 57 nt, Homo sapiens
gcagccugggguuaagggagguauggcacaaauauucccuuagcugccucagccugc

SEQ ID NO: 55087 - RNA, 66 nt, Homo sapiens
gaugcuacucauuucaccuauauuauugaauuucaucugugaggacuccgugagguggguaguauc

SEQ ID NO: 55088 - RNA, 64 nt, Homo sapiens
gaugcugagagauuggagacuaguuucauucuucuguauguggauauccaguuuucccagcauc

SEQ ID NO: 55089 - RNA, 57 nt, Homo sapiens
gaugaggcuagagacauguguagggagcauaccauagacagauuuguaggucuuauu

SEQ ID NO: 55090 - RNA, 65 nt, Homo sapiens
gauggcacuaagccauguaggaaggauccaucuccaugauccaauaccuccaacuaagucccauc

SEQ ID NO: 55091 - RNA, 126 nt, Homo sapiens
gaugguauuuucucaugacuaccuccagcaaagacuuauggaaggcuugugauaccucagcuuggauuacaugucuauccaugaacaauuauuguggacaaggacauagauuuucugaguaccauc

SEQ ID NO: 55092 - RNA, 75 nt, Homo sapiens
gauguaggauaacagcauuauugcauacguuaauuauucauugaacuacuuaugucuaugaugcugacauacauc

SEQ ID NO: 55093 - RNA, 67 nt, Homo sapiens
gauguauuaucuuugugguaucguguugaauucauuuagcugguauuuugucaaggauauuuacauc

SEQ ID NO: 55094 - RNA, 56 nt, Homo sapiens
gaugugcaaauuuccaaacucuuaaaacagaauaauuaaggggugaauugcacauu

SEQ ID NO: 55095 - RNA, 85 nt, Homo sapiens
gauguguuugacauaguuucugaaauagaccacagcauaugccacuugguuucuauuuuaagauagguauguugacagaggcauu

SEQ ID NO: 55096 - RNA, 95 nt, Homo sapiens
gauguugagaauuuuuucauaagcuuuuggacauuuggauuuucucauuugugaaguuucuguucaaauuguuugugaaguuccugcuugacauu

SEQ ID NO: 55097 - RNA, 55 nt, Homo sapiens
gcaaugcugucugugcacagaucaugaggaaggucuguggguuuugcagaguugc

SEQ ID NO: 55098 - RNA, 86 nt, Homo sapiens
gcaauguaguccacauccaucagacggcaggcguugaguaccagagaggcauaccaugucuauaaucugaggacauccugcauugc

SEQ ID NO: 55099 - RNA, 58 nt, Homo sapiens
gcaacacuggcuuugugaauacaucuucuaaagggaauuauucacucuccagucuugc

SEQ ID NO: 55100 - RNA, 114 nt, Homo sapiens
gcaaaggucuaacagggguauugauaucagaguggguuuuaaaaguguauuaacuauaaucuuacuuuuagccuauuugauucuacuuauuucagaacuauuaaugacguuugu

SEQ ID NO: 55101 - RNA, 60 nt, Homo sapiens
gauuccuuuuaaugguuaaaguugcaggucugaaaauauuuugaucauuaaaagugaauc

SEQ ID NO: 55102 - RNA, 82 nt, Homo sapiens
gauuaauuuguugagaaguaguauguuuauagcauugaguccuacgauucauaauauauauggcauauauuucaguuuaguc

SEQ ID NO: 55103 - RNA, 78 nt, Homo sapiens
gauuauuuuuaagggagacuuuacaagcauuaacaacuuguuugacuguuuuuguaaaguucucucccgaaaacaauc

SEQ ID NO: 55104 - RNA, 58 nt, Homo sapiens
gauuccauugcgaauuuucagaucaacuuuucuaccucugaaauaguccauugggauu

SEQ ID NO: 55105 - RNA, 80 nt, Homo sapiens
gauugcugagcugacuuugauguugguguuuaaugauaaacagauuucagauaacacggcccgcagagcaagcuguaauu

SEQ ID NO: 55106 - RNA, 58 nt, Homo sapiens
gauucuuggugauuuuaggggggaagacuccguaugaguuccuuaguuauagagaguc

SEQ ID NO: 55107 - RNA, 91 nt, Homo sapiens
gauugacucuuucaugaaagauuucucuguagcauaugaugcuguuugacagcauauuacaguagaaugucuuucaaaauugggguuaauc

SEQ ID NO: 55108 - RNA, 73 nt, Homo sapiens
gauugagagaaaaggcagcuguuauauacugaguauauauuauacucuuauucaucuguuuuuucuuaagauu

SEQ ID NO: 55109 - RNA, 67 nt, Homo sapiens
gcaaacuuuuuacucaaugauuccucugauaacaaguuaugggagaaccauuuggagaaaaaguugc

SEQ ID NO: 55110 - RNA, 85 nt, Homo sapiens
gauuuugaaagacuuucugcuguggauaaaaugcucucaaacagcaucauaugcuacagagaaaucuuucaugaaaggaagaguc

SEQ ID NO: 55111 - RNA, 72 nt, Homo sapiens
gauuuugucccucucaccaacggggaagaaugguugguuuuauuggguccugcuaagagagggaauaaaauu

SEQ ID NO: 55112 - RNA, 81 nt, Homo sapiens
gauuuuucaucugguuuagcugguuauuauauaugacaaaaagagaucacaaugugauaguuggcuaaagcagucugaguc

SEQ ID NO: 55113 - RNA, 87 nt, Homo sapiens
gauaaacaggaaugcuuuuacacuguugaugggaguguaaauuaguucaaccauugcagaagacaguguggcgauuccucaagaauc

SEQ ID NO: 55114 - RNA, 64 nt, Homo sapiens
gauaaagauagcaauagggacaaaaaguaaaauaaucucuuguguuauuauugcuauuauuauu

SEQ ID NO: 55115 - RNA, 62 nt, Homo sapiens
gauaaaguauuggguacuaugcacaccugggugacgggaucaguuguacuccaaaccuuauc

SEQ ID NO: 55116 - RNA, 67 nt, Homo sapiens
gauaaaucuuaucuuuguuacuuguuuauggcuggaagcggaaauaagucacacagauuaauuuauu

SEQ ID NO: 55117 - RNA, 68 nt, Homo sapiens
gauaaaugcuugaguggaugguaucccauucuccauaaugugauuauuaugcacugcaugccuguauc

SEQ ID NO: 55118 - RNA, 103 nt, Homo sapiens
gauaaggcuuugccuuaagggaauguuguggcugguuggauguuuuauccagaccacuaaaacuuucuccauaucaccaauaaggcugcuuugcuuucuuauc

SEQ ID NO: 55119 - RNA, 59 nt, Homo sapiens
gauagcagaccaccucucccacugggagcuccaucccagggugguuugaaacuguuguc

SEQ ID NO: 55120 - RNA, 70 nt, Homo sapiens
gagugguagagguagacuuccuugucuuauucuaguucuuugagaaaagguuuucagcuuuuccccauuc

SEQ ID NO: 55121 - RNA, 84 nt, Homo sapiens
gaguuaauaggugcagcacaccaacauggcacauguuuacauauggaacaaaccugcauguugugcacauguacccuaaaacuu

SEQ ID NO: 55122 - RNA, 82 nt, Homo sapiens
gaguuaaugggugcagcacaccaacauggcacguuuacauauguaacaaaccugcacguugugcacauguacccuaaaacuu

SEQ ID NO: 55123 - RNA, 104 nt, Homo sapiens
gaguauauacugcaugacuccauuuaucugaaauuuuauaauagucuaaacuaaucuaggaugauaggaaucagaaaagugguugucugugaggugugugauuc

SEQ ID NO: 55124 - RNA, 99 nt, Homo sapiens
gaguuucauacauguuguugugcauaucagagguuugcugacuuuuauuacuguguaguguuccuuuguguggacaccucacaauuuguuuauguauuc

SEQ ID NO: 55125 - RNA, 91 nt, Homo sapiens
gauaggauagaugguucugaguggcuuucaacacugacuacuauucucuuuuagccagcagugaguagcuuacucagaauuguccccuauc

SEQ ID NO: 55126 - RNA, 67 nt, Homo sapiens
gauaguggaguguaaagcgucuuuuucagacaguuuucugcaggaguggcuauuaagcugcaguguu

SEQ ID NO: 55127 - RNA, 101 nt, Homo sapiens
gauauauaaauauauguagaaaaagucuagaggaucaugugugguuuucucuaaguagaggcauuauaaaugauugucacuuuauauacauacuuuauauc

SEQ ID NO: 55128 - RNA, 63 nt, Homo sapiens
gauauggucaaagucacaaucucacuuggcugaacucucaagcugugugacauugagcauguc

SEQ ID NO: 55129 - RNA, 70 nt, Homo sapiens
gauauuccuauccuuaagucuucucaacuugaauucacguguuacugaaagacugaagaauaggcauguc

SEQ ID NO: 55130 - RNA, 108 nt, Homo sapiens
gauauuucacauaaauggaaucauacguauguaguucuuuugugacuggcuucuuccgcuuagccagauacagccacauaauguaugauuccauuuuuaugaaauguc

SEQ ID NO: 55131 - RNA, 79 nt, Homo sapiens
gaucagaguagcugucguuuuuuccuuuacugcagaauuauuauuuuaaguaaaugaaagguugauuuauaucugcauu

SEQ ID NO: 55132 - RNA, 56 nt, Homo sapiens
gaugaagugcccucuagugacccaacuaagugguggucacuggagcucauuugauu

SEQ ID NO: 55133 - RNA, 101 nt, Homo sapiens
gaucuggaaaauagcaggaagauaagagggaggugccucagucccgugggcaguuggugacucaggcaccuuccucuuaucugccugugggcacccagguc

SEQ ID NO: 55134 - RNA, 58 nt, Homo sapiens
gaucuuggagugcuugucaguggaagcuugugucucuugugacaugaaacccaagauc

SEQ ID NO: 55135 - RNA, 71 nt, Homo sapiens
gaugacauugaaaagcaaguggacuuaaauugcauaaucagaacuuauauucauagcuuuuuggucucauc

SEQ ID NO: 55136 - RNA, 73 nt, Homo sapiens
gaugagaauugcauugaauuuguagcuugcuuuuggcaguauggucauuuucacaaugucgauucuacccauc

SEQ ID NO: 55137 - RNA, 56 nt, Homo sapiens
gaugagcuaguguaggguacugaucuaauuuguuaggcuuaagucaccugcucauc

SEQ ID NO: 55138 - RNA, 108 nt, Homo sapiens
gaucccuucccagugaguguagguagaacaugugaaugugaucggauagucacuucugugauuauaaugcauuauaugggacuccacucuaacacauuaggagggauu

SEQ ID NO: 55139 - RNA, 130 nt, Homo sapiens
gaucucauuuauccauuuuugccuuggcugcuugugcuuuggggguauuauucaagaaaucuuugcccagaucaauuuccuggagaguuuucccaaaguucuucuucuaguaguuucaugguuugagguc

SEQ ID NO: 55140 - RNA, 60 nt, Homo sapiens
gagcuagguuuugaauccagaccauauacucauggccauuaggacuucaaacaucagcuc

SEQ ID NO: 55141 - RNA, 79 nt, Homo sapiens
gagcaggaacucagugccagaaugauacuguuaacgaaagaucucaccaaucuuucucuucaugucguuuuuccuguuc

SEQ ID NO: 55142 - RNA, 70 nt, Homo sapiens
gagcaucaugauuuccaguuauuauaccucuuaaaacaaguuuaaggaucauggcugggcgugguggcuc

SEQ ID NO: 55143 - RNA, 128 nt, Homo sapiens
gagcccucacuaauauagcaauauaugugucauuugucucacuaguaaggcuguuuaguagucaaaacuguagaaaauugaauauacacuuacuguauaaaaaugauaugcuugguuagugauaguuu

SEQ ID NO: 55144 - RNA, 70 nt, Homo sapiens
gagcccugaaagcuacagucuccuaggacccugaaggcuccuaaaccuuugagcuuuugucagaggguuu

SEQ ID NO: 55145 - RNA, 71 nt, Homo sapiens
gagcccugggauuguucuccugcaacuagauguucccaucugguggugaugagagacaguaacaaauccuu

SEQ ID NO: 55146 - RNA, 56 nt, Homo sapiens
gagccuccuccuggucccuauuauaaaagaacaaaguggucaccuucaggagguuc

SEQ ID NO: 55147 - RNA, 65 nt, Homo sapiens
gagcucaggaguggcuuuggcugcaucuuucucauagugaugaauugucagucacugccuggcuu

SEQ ID NO: 55148 - RNA, 99 nt, Homo sapiens
gagcugauagcacauaguguagacaagugaauacaggauucucuggguuauauuuccagaagucuggaggucauuuggauauuugugggcccuuggcuu

SEQ ID NO: 55149 - RNA, 59 nt, Homo sapiens
gagcugcaauguuuaguauaauauauguacggcauauguugcuggaguaguugcagcuu

SEQ ID NO: 55150 - RNA, 105 nt, Homo sapiens
gaggaaaagaaguucaacaucaagguauuggcagaauugguuucuucuaaggccucucuggcuuggagauggccauuuucuuguaucuucaugugaucuuuccuc

SEQ ID NO: 55151 - RNA, 78 nt, Homo sapiens
gaggaaccuucauacuguuuccauuaugguucugccaauuuacauuuacauuucugccaacaguguguaaguuuccuu

SEQ ID NO: 55152 - RNA, 83 nt, Homo sapiens
gaggaauuagcaucagauuccauauucuauauagcagagauuuauaggaugaugggauuugagguuuuaaaucacgaguucuc

SEQ ID NO: 55153 - RNA, 57 nt, Homo sapiens
gaggagaaugcugauaauuggugaaacuaggugauaggaguuuauugcauucuucuc

SEQ ID NO: 55154 - RNA, 69 nt, Homo sapiens
gaggaggaggagggggaggaggaggaagaaucuguauuuucuugcuuguuguucccuucauuuuuccuc

SEQ ID NO: 55155 - RNA, 123 nt, Homo sapiens
gaggaggaggccuugauggugcgcauucgagcugaucuuuucugauuccagugggaccucucucugccaaccuccacuaggagucucaaaaagacucagcccugcuucauccagacuccccuc

SEQ ID NO: 55156 - RNA, 57 nt, Homo sapiens
gaggaggauuugagaggagacaaaagagaaaucuguuagcuugucaaaucuuuccuc

SEQ ID NO: 55157 - RNA, 56 nt, Homo sapiens
gagcuggacuucuuaccuuuucaaagaccaagaaaagucugagaugauuccagcuc

SEQ ID NO: 55158 - RNA, 97 nt, Homo sapiens
gagcuggauggaugauguguuuuaggaucucagcauaguaugggccaaauaccugcugauuaugaugcaucagauugagaaacuuccagcccaguuc

SEQ ID NO: 55159 - RNA, 87 nt, Homo sapiens
gaggaucacuugaacccuggagguugaggcugcagugagcagugauugugccauugcacuccagccugagugacagagugagacuuc

SEQ ID NO: 55160 - RNA, 98 nt, Homo sapiens
gaggcaggagaaucacuugaaccugcgaggcggagguugcaguaagccgagacugugccacugcacuccggccuggcaacagagugagacuccgucuc

SEQ ID NO: 55161 - RNA, 99 nt, Homo sapiens
gaggcaggagaaucacuugaaccugggagguggagguugcagugagcugagaucaugccauugcacuccagccuuggugacagagugagacuccgucuc

SEQ ID NO: 55162 - RNA, 99 nt, Homo sapiens
gaggcaggagaaucacuugaucccaggagauggagguugcagugaaccgagaucaugcuguugcacuccauccugggcgacagggcaagacuccgucuc

SEQ ID NO: 55163 - RNA, 98 nt, Homo sapiens
gaggcaggagaaucacuuggaacagggaggcguagguugcagugagccaagauugcuccauugcacuccauccuuggcaacgagugaaacuccaacuc

SEQ ID NO: 55164 - RNA, 100 nt, Homo sapiens
gaggcaggagaaucgcuugaacccaagaggcagagguugcggugagccaagguggugccauugcacugcauucugggcaacaagagcgaaauuccguuuc

SEQ ID NO: 55165 - RNA, 100 nt, Homo sapiens
gaggcaggagaaucgcuugaacccaggaggcggagguuguggugagcgaagaucgugccauugcacuccagccugggcaacaagagcaaaacucugucuc

SEQ ID NO: 55166 - RNA, 97 nt, Homo sapiens
gaggcaggagaaucgcuugaacccgggcagagguuguggugagcaaagauugcgccauugcacuccagccugggcaacaagagugaaacuucgucuc

SEQ ID NO: 55167 - RNA, 104 nt, Homo sapiens
gaggcaggagaaucgcuugaacccuggagguggaggcuguggugagcugagauugccccauugcacuccagccugccugggcaacaagagugaaacucugucuc

SEQ ID NO: 55168 - RNA, 100 nt, Homo sapiens
gaggcaggagaaucguuugaaccugggaugcggagguugcggugaguggauauugcgccauugcacugcagcccgggcaacaagagcgaaacuccgucuc

SEQ ID NO: 55169 - RNA, 99 nt, Homo sapiens
gaggcaggagaauugcaugaacccggcaggcggagguugcagugagcagagauugcgccauugcacuccagccugggcgacaaagcaagacuccgucuc

SEQ ID NO: 55170 - RNA, 100 nt, Homo sapiens
gaggcaggagaauugcuugaacccaggaaguggaggcuucagugagcugagaacacgccacugcacuccaguccugggcaacagagcaagacucugucuc

SEQ ID NO: 55171 - RNA, 71 nt, Homo sapiens
gaggcuuucuggucuaaaggcacaggcaagggaguguuggccauuugucuccuagacgaccaggcggccuc

SEQ ID NO: 55172 - RNA, 121 nt, Homo sapiens
gagggcagagauggcagcaagcauuccuuggcugaggccugcauugaacuagaaggcuguugauaaggcuuaucauggggacugcagccuagccucggauagcuccuccauccuucuccuc

SEQ ID NO: 55173 - RNA, 60 nt, Homo sapiens
gaggguacagggcuaaacaagucaucuccauaaagguccucuugccuagcccuuugccuc

SEQ ID NO: 55174 - RNA, 89 nt, Homo sapiens
gagguaacacuguagcugagggcaugcguucaggaguuaaucugcccaauucaaauucuggcuugacagccuucuagcugcaugaccuc

SEQ ID NO: 55175 - RNA, 65 nt, Homo sapiens
gagguaagagggagucacacaaaauaguaagguuucauucuuauguagucauuccuuuuugcuuu

SEQ ID NO: 55176 - RNA, 63 nt, Homo sapiens
gagguaugagcugagaaauccuccuccuuugagacaacugcucacuuucucaguucugaucuc

SEQ ID NO: 55177 - RNA, 92 nt, Homo sapiens
gaggucauucaaugcucucucugaguuucagggaacuuagcaauucuuaaguucauucaugaaacuuaguucugaggguaccagcaggcuuc

SEQ ID NO: 55178 - RNA, 100 nt, Homo sapiens
gaggugagaggauugcuugaucccaggaggucgaggcugcagugagccaugauggcccuacugcacuucagccuugggaaacagaguaagacccugccuc

SEQ ID NO: 55179 - RNA, 103 nt, Homo sapiens
gaggugggaggaucgcuugagcccaggagguggagguugcagugaccuauggucgcaccacugcacuccagccuuggccacagagcaagaacucccccgccuc

SEQ ID NO: 55180 - RNA, 98 nt, Homo sapiens
gaggugggaggauugcuuguuccccggagguugaagcuacagugagccuugauugugucacugcacuccagccugggcaacagguaagacucugucuc

SEQ ID NO: 55181 - RNA, 123 nt, Homo sapiens
gaggugggagguucgauugagaccaggaggcagaggcugcagugaguugagaucaugccgcugcagugaguugagaucaugccacugcacuucagccugggugacagagcgaaacccugucuc

SEQ ID NO: 55182 - RNA, 99 nt, Homo sapiens
gagguggggucuugcucuguugcucaggcuggagugcaguggugugauuauagcucauuuuagccuugagcucaugggcucaggcaguucuccuaccuc

SEQ ID NO: 55183 - RNA, 111 nt, Homo sapiens
gaggugggguuuuuuuguuuguuuuugcuuuguuuugagacagagucuugcucuguugcccaggcuggagugcaauggcacgaucucgucucacugcaagcucuccgccuc

SEQ ID NO: 55184 - RNA, 74 nt, Homo sapiens
gagguuaugauuuguuucaggaguuuucuaggaguugagguucccaucagaaaacucagaggccaauagaccuu

SEQ ID NO: 55185 - RNA, 73 nt, Homo sapiens
gagguucuacuggcauuuaguggguagaggacaaggauggcacuaaauauccuacaaugcacaggagagccuc

SEQ ID NO: 55186 - RNA, 88 nt, Homo sapiens
gaguaaacaaagugcaugacugauauuugagauacuucaugccuuaucucuggauaucuacuuauguucuauuuucauuuguuuguuu

SEQ ID NO: 55187 - RNA, 59 nt, Homo sapiens
gaguaacagcauaaauuugugacuuguuguacuggauaauucaggaguuaguugugcuc

SEQ ID NO: 55188 - RNA, 58 nt, Homo sapiens
gaguaacaugaacuuucaaauauggacuuuucuuaagcccuuuggcuguucaugacuc

SEQ ID NO: 55189 - RNA, 64 nt, Homo sapiens
gaguaagugcucuugaaacugccuuagcaaaauuaugacugagacagugaaagagauuuaacuu

SEQ ID NO: 55190 - RNA, 58 nt, Homo sapiens
gaggcggagguugccaccacugcacuccagcuugggugacauggcgauacuccgucuc

SEQ ID NO: 55191 - RNA, 80 nt, Homo sapiens
gaguaccuagcagacaugggcugaaccacacaaaaucaucuauaaguggucuccacaugcuuugcucuguccaagcacuc

SEQ ID NO: 55192 - RNA, 59 nt, Homo sapiens
gaguagccaguauuuccacagagugggguuacuucuaauuugugcuaaucuggauauuu

SEQ ID NO: 55193 - RNA, 101 nt, Homo sapiens
gaguagcugggauuaaagcgugugccaccauguccggcuaauuucuuuguauuuuuaguagagauggguuuucacauguuggccaggcuggucucgaacuc

SEQ ID NO: 55194 - RNA, 56 nt, Homo sapiens
gaguagcuguacuaucuuacauuccugccagcaauguaugagagacauggcugcuu

SEQ ID NO: 55195 - RNA, 126 nt, Homo sapiens
gcauaguauuccaugguuguauguaucacauuuucuuuauucaauaugucauuggcaggcauuuagguugauuccaugucuuugcuauugugaagagugcugcaaugaacauucgugugcaugugu

SEQ ID NO: 55196 - RNA, 92 nt, Homo sapiens
gcauauaauagcaaaaauaguaauaauaguuguuaauauuuauuuagaacugccaauuguugacaaugcacugugcuaagugcuuuauaugc

SEQ ID NO: 55197 - RNA, 57 nt, Homo sapiens
gcauauugguauaggucuauuucugaguuuucuuuucugaucuguugaucaaugugu

SEQ ID NO: 55198 - RNA, 77 nt, Homo sapiens
gcaguuuucuagcaguggaaucuguuauacuaacucuuugaaugaguaacugaaacagauucugaaacugaaacugc

SEQ ID NO: 55199 - RNA, 67 nt, Homo sapiens
gcauaaucuacuugacugaguacaggagaguaacaauagucuucauagucuaugcaaguaagagugc

SEQ ID NO: 55200 - RNA, 92 nt, Homo sapiens
gcaucacugguuagaggaauaauugauuaggggucaccgauggggguuauuaguuggagagucacuaguuagugcuaauagccaagagaugu

SEQ ID NO: 55201 - RNA, 62 nt, Homo sapiens
gcaucuccaggauuuucacacucagagaugaccacucuuaugaguagaacuccuggagaugu

SEQ ID NO: 55202 - RNA, 78 nt, Homo sapiens
gcaucugaauauagaaucaucugugcacuaguaaauuaagcuguauacuagucauuuaggugauauuauaacagaugu

SEQ ID NO: 55203 - RNA, 61 nt, Homo sapiens
gcaggugagccuuccagguguggguccccuccugggcacucacugugagaguuuauccugu

SEQ ID NO: 55204 - RNA, 94 nt, Homo sapiens
gcagucagagggcagagaaaggcagggaccuucaguugcacaggaaggucugcaucuggguccguucugcuucucacugcacauguggccuugc

SEQ ID NO: 55205 - RNA, 112 nt, Homo sapiens
gcagugcauggugguguacaccuguagucccagcuacuuagggggcugagguaggaggauuaccucagcccggggaaguugaggcugcagugaaccaugaucacaccacugc

SEQ ID NO: 55206 - RNA, 79 nt, Homo sapiens
gcaguucgcuucaagguuauaucuuaaaauccaagagaaaggggaaaaaaaguuaagaugcauuuugaaguuaagcugc

SEQ ID NO: 55207 - RNA, 94 nt, Homo sapiens
gcagggaaacucagacucagggaguggaggggcuugggggugggaacccagccccccauguucucucugcagcuccacaccacuguucaccugc

SEQ ID NO: 55208 - RNA, 67 nt, Homo sapiens
gcaugucauguuucuacugaccaaauucugggagucuccccuuuggguaaaaacauaacacucuugc

SEQ ID NO: 55209 - RNA, 71 nt, Homo sapiens
gcaugaucuauaguauagcauauuaagcauuuguacuuccccagaugcauugguggcauauucauccgugu

SEQ ID NO: 55210 - RNA, 58 nt, Homo sapiens
gcauguucagcuuuaguauguuuucagaaaugcauuacauaaagaagcaggacauugu

SEQ ID NO: 55211 - RNA, 87 nt, Homo sapiens
gcauuacaauggcaaugaaauagugagaguggauaaccucgucuuguuucgauuucaaagcuuucaauauuuuaucauuguguaugu

SEQ ID NO: 55212 - RNA, 71 nt, Homo sapiens
gcauuacauagucaaggugucucauuucuaacaaauaccagaaauuacacuuguaaauggcauguaugugu

SEQ ID NO: 55213 - RNA, 94 nt, Homo sapiens
gcauuauaaagaugugcaaauucauguucuuuacucuucgaaguauggaauguagagaguauguguuuguauauauuuaaauaaauauuaaugc

SEQ ID NO: 55214 - RNA, 63 nt, Homo sapiens
gcauuaugccuuagauauugaauggcuagauuuacuaguagcaauggcucugagcuaucuugc

SEQ ID NO: 55215 - RNA, 92 nt, Homo sapiens
gcaugcaggcuuaauacaugggugauagguucauaggugcagcaaaccaccauugcacacauuuaccuauguaaaaaaccugcacauccugc

SEQ ID NO: 55216 - RNA, 64 nt, Homo sapiens
gcaugcgggccugggcuuggcagggucccaucauucuuuuuucugcagccauucagcccuaugc

SEQ ID NO: 55217 - RNA, 59 nt, Homo sapiens
gcaugcuuccucacuaagcuuagccauuucuagcuugugauuuagagugagagacaugc

SEQ ID NO: 55218 - RNA, 67 nt, Homo sapiens
gcauggaugugaaaucauaguuucuaguaagacacagaaacguguaugugauauucacauagguugc

SEQ ID NO: 55219 - RNA, 57 nt, Homo sapiens
gcauggcaauaugaugcacuguuugcgggaguccugcgagggcacauuguuccgugc

SEQ ID NO: 55220 - RNA, 128 nt, Homo sapiens
gccaauuuaaauuugaauuucagauaaaugauacauuuuuuaguacaagucugucccaugcaauauuugggaucaacuuauacuaaaauuguuuuguuguuguuucucugaagucaaauuuaacuggc

SEQ ID NO: 55221 - RNA, 112 nt, Homo sapiens
gccaaggacaugagcaaccacagaccugugcauaugcaugugcaugcacguggaccuucacgccgugugcaugcuuuuguaugucuacaggcuuuuuggagaugugccuggc

SEQ ID NO: 55222 - RNA, 67 nt, Homo sapiens
gcaugguguuaggcacugggaauggaauacugaacaaaucagagacauucuugccuucaccgagugc

SEQ ID NO: 55223 - RNA, 94 nt, Homo sapiens
gccaaaugcuuugcuagagcugguaaaauggaaccaaaucgacuguccaauggauuugguccccuucaaccagcuguagcugugcauugauggc

SEQ ID NO: 55224 - RNA, 60 nt, Homo sapiens
gcauuuugugauauccgaccaugaaguuaugucuauugugugucuuuuaucacacaaugu

SEQ ID NO: 55225 - RNA, 60 nt, Homo sapiens
gccaaagagguuuaguuuguugagguuuuguaaaaccuggcacuuagcaaaucugauggc

SEQ ID NO: 55226 - RNA, 58 nt, Homo sapiens
gcccaggauggagugcagugauacgaucuuggcucacugaaaccacugccuccugggu

SEQ ID NO: 55227 - RNA, 64 nt, Homo sapiens
gcccaggauuuugaagcugcagugagcuaugaucacaguugugccauugcacuccagcuugggc

SEQ ID NO: 55228 - RNA, 66 nt, Homo sapiens
gccccuccuucuagagaggugagcuggagaaggucauuuucucaguuccuacuuuggugaaggggu

SEQ ID NO: 55229 - RNA, 71 nt, Homo sapiens
gccaguauuuuauugaggauuuuugcaucaauguucaucaaggauauuggccuaaaauucucuuuuuuggu

SEQ ID NO: 55230 - RNA, 64 nt, Homo sapiens
gcccuaaaguagaauaaccuuuucuuucuccaugaauggaauguaaguuauguuugcugagggc

SEQ ID NO: 55231 - RNA, 58 nt, Homo sapiens
gcccuagaacucgaggcuauagugaacuaugauugcacuauugcacuccagucugggc

SEQ ID NO: 55232 - RNA, 70 nt, Homo sapiens
gccauguacauaguagacacugaaaauauauauauauauauauuuauucagugucuaguaucugccuggu

SEQ ID NO: 55233 - RNA, 58 nt, Homo sapiens
gcccaacaaccagaacucaguccacugaaagguaggaaaugcagucuuuguucugggc

SEQ ID NO: 55234 - RNA, 74 nt, Homo sapiens
gcccaccaaggcagacuguggaguucuuucucaguggugagacaaaggcccauagcugcuuggcuggccugggc

SEQ ID NO: 55235 - RNA, 66 nt, Homo sapiens
gccaggcaaaggcuuccacugcauccuuccaggcauguggaggauaaacacggagcuuccccuggc

SEQ ID NO: 55236 - RNA, 71 nt, Homo sapiens
gccaggcaacauuuaccucaaucuugcugaagagcccuugggcuuaaagcgaauauuggugguauccuggc

SEQ ID NO: 55237 - RNA, 66 nt, Homo sapiens
gccacugggccuugccuacuuauguaauuuuuaaaaauuacaugucuugguaagguuagaaguggc

SEQ ID NO: 55238 - RNA, 69 nt, Homo sapiens
gccaauaucaaugaccaugguccagggaacagucucaagaaguccugagaacaugcacuugagguuggc

SEQ ID NO: 55239 - RNA, 67 nt, Homo sapiens
gccaaugccuggcaugcaugcauucauucauucacugauaggauuuugcuauguuguccaggcuggc

SEQ ID NO: 55240 - RNA, 79 nt, Homo sapiens
gcccucgcuuucagagucaucugcccaaguacaguaaacagauccagcuacuacuuagauacuuugagaaguuuagggu

SEQ ID NO: 55241 - RNA, 58 nt, Homo sapiens
gcccugagagcaguguuucggacgcugggaagcgcgcugugcaaagcgcucucggggu

SEQ ID NO: 55242 - RNA, 88 nt, Homo sapiens
gccuacuacacagccaggauuuguaguguaccuaauguucuuaggcuacaaaccuauacagcaaguuacugugcugaauacuguaggc

SEQ ID NO: 55243 - RNA, 66 nt, Homo sapiens
gccuagagcuucaaaguuggcuaggagacaccccaggggugucuuaggaucaauuuuggauugggc

SEQ ID NO: 55244 - RNA, 71 nt, Homo sapiens
gccgucagccgaacuuaggguuacucugaaauaugcucuguauauuagaacuagaggaguuugagugaggc

SEQ ID NO: 55245 - RNA, 130 nt, Homo sapiens
gccuaugacaucuggguugguuccaagucuuugcuauugugaauggugccgcaauaaacauacaugugcaugugucuuuauagcagcaugauuuauaauccuuuggguauauacccaguagugggauggc

SEQ ID NO: 55246 - RNA, 77 nt, Homo sapiens
gccucuucucaagaaagugcuguagacugggcgcaguagcuacugccuguaauuccagcacuuugggaagcugaggc

SEQ ID NO: 55247 - RNA, 124 nt, Homo sapiens
gccugacuagcuaccuacuguaacaaaaucuguaucaugucuucccagugauucuauauuuugguaauauagaaucaacuuguggagaaggcagcaugauguagugaacaaagcuucagcaggc

SEQ ID NO: 55248 - RNA, 92 nt, Homo sapiens
gccugacucuuggcaagugcuugaugaaugaucaauauuauuauuacuauuguuguuauuauuacuaagucuuccuaagaagagucaugggc

SEQ ID NO: 55249 - RNA, 77 nt, Homo sapiens
gccugagaaauuagcauggucacuuugggccccauaccuugggguaugugggcucugaccugacuuuaaauccaggc

SEQ ID NO: 55250 - RNA, 69 nt, Homo sapiens
gcuuucugaggccucaccagaagcagauggcaacacuacgcuucuuguaaagccugcagaaccauuagc

SEQ ID NO: 55251 - RNA, 77 nt, Homo sapiens
gcuuugcccugagaugcuguuaaucuguaacuuuagccccgaccuugagcucacagaaacauguguuuuauggaacc

SEQ ID NO: 55252 - RNA, 94 nt, Homo sapiens
gcuuugcgcuaauggacuguuauaaaaugcacaguuguuucuugcagucacugccaaaugccucccauucuacugacaguuuugugcauuaggc

SEQ ID NO: 55253 - RNA, 78 nt, Homo sapiens
gcuuugcuagagcugguaaaauggaaccaaaucgccucuucaauggauuugguccccuucaaccagcuguagcuaugc

SEQ ID NO: 55254 - RNA, 58 nt, Homo sapiens
gcuuugggauuccuuauuuuuggaugaguggcuuugaaagugaauguaucccguaagu

SEQ ID NO: 55255 - RNA, 62 nt, Homo sapiens
ggaaaaggggauuaagggaaaguuuacgugcugcauggugagacacuucccagaucccuucc

SEQ ID NO: 55256 - RNA, 108 nt, Homo sapiens
ggaaaaucuuucuuuguccucaagauaauaauuaaaaauagucuaugcaagauuuauuuugaauagaagguuuuuuguucagauuaucauaggaaagagaauauuucc

SEQ ID NO: 55257 - RNA, 73 nt, Homo sapiens
ggaaagacaccuuacuauguuaauauggguuacuacugggcaaugggauuauacauggcugauggguuuuucu

SEQ ID NO: 55258 - RNA, 84 nt, Homo sapiens
gcuuguucuaaacgugaauucaccugacucccugaaagaacauucucuuucauggaacaaguggguucaaagcacagaguaagc

SEQ ID NO: 55259 - RNA, 115 nt, Homo sapiens
gcuugcuuuguuaaaugugugaaaugagaaaguggacuaagugaauaugaauagaauuggauauauuuauacauuugcuuuauuugaaaguuuaacuaugcuuaauauugcaggu

SEQ ID NO: 55260 - RNA, 62 nt, Homo sapiens
gcuuggcagcacgcaguccagaggcucccggagccaggcccucugcggauguuugcugcggc

SEQ ID NO: 55261 - RNA, 55 nt, Homo sapiens
gcuucucuaguugccuggagcauaguaauaugauuuuccagcacauuagggaagc

SEQ ID NO: 55262 - RNA, 83 nt, Homo sapiens
gcuucuuucacugagaaugauguuucugagguucguccacacugaggcauguaucagaacuucauucuuuuugaugacugagc

SEQ ID NO: 55263 - RNA, 64 nt, Homo sapiens
gcuugaagcugagaggcagagguugcggugagccgagauugcgccauugcacuccagccugggc

SEQ ID NO: 55264 - RNA, 107 nt, Homo sapiens
gcugugugugcauaugugaacacauacaugcaugggcaugugugcaugugaaugcaugucaugugcaugcaugagccauguguggugugugcaugugugugugcagc

SEQ ID NO: 55265 - RNA, 83 nt, Homo sapiens
gcugucucucauuagccauaggguguguugugguguccagugugacauuauuagguuaaccuauagcuacaugugaugauagu

SEQ ID NO: 55266 - RNA, 115 nt, Homo sapiens
gcugucuuuggaaaucugccauagauauucauggaauuaauuaaaauauacuggauuuaaauggagauagauagauugauugauugauguacaugauuuaagguauagagucagc

SEQ ID NO: 55267 - RNA, 69 nt, Homo sapiens
gcugguuuauuguuauuuauauccacagacacaaaaucuguacccuccagugauaacaguggacuaugc

SEQ ID NO: 55268 - RNA, 99 nt, Homo sapiens
gcuguaaccuuuucagaugaugccgcugaaaaccuuaaaguacuguuguguuuucacagugcuguuguguuuucacguggucacaccucucugugcagc

SEQ ID NO: 55269 - RNA, 119 nt, Homo sapiens
gcuguauuucuucuccuuugacuuagaauggaagguugagaagaacuguggccuguucaaccccaggccuucucuuagcacuuuguguuacuguguugggggccaaaaaggaaucaggc

SEQ ID NO: 55270 - RNA, 73 nt, Homo sapiens
gcuguuguguuauggaagcuaugccagcuggcaccuuucuugguucagugccucaguuuuuaaagaugacagc

SEQ ID NO: 55271 - RNA, 65 nt, Homo sapiens
gcuuaagggaaugugguagcugguuugaucgucuauccagaccacuuaaauuuuccuauaucagc

SEQ ID NO: 55272 - RNA, 63 nt, Homo sapiens
gcuuaagggaauguuguggcugguuugaucuguucagaccaccaaaacuuucuccauaucagc

SEQ ID NO: 55273 - RNA, 74 nt, Homo sapiens
gcuuagagcaccauuagcguugggccggugccacagagcaaauaggacugagccccaucugaggugcccagagu

SEQ ID NO: 55274 - RNA, 59 nt, Homo sapiens
gcuuagcaaacugagagccacuaucuauuuuacagagcauggcucuuugcugcuaaagu

SEQ ID NO: 55275 - RNA, 98 nt, Homo sapiens
gcuuagcuauccagaaaacauaaaauguggacaucggaggaaaaaagaaccauucuugggguuuccagguggccaacauuuuacuguguggcauaggc

SEQ ID NO: 55276 - RNA, 70 nt, Homo sapiens
gcuucaaaacuucaaagaacaggcugauuauuguuagggucuacugcagcuggugacuuuaaguugaagc

SEQ ID NO: 55277 - RNA, 72 nt, Homo sapiens
gcuucccaagaauugaaugauugucuuaugagagagugaaauuuccaucaucaggcucauucaagcugaagu

SEQ ID NO: 55278 - RNA, 55 nt, Homo sapiens
gcuuccaaucauggugaaaggcaaguggggagccagagucucacaugguggaagc

SEQ ID NO: 55279 - RNA, 74 nt, Homo sapiens
ggaauaaaaaauggcuauuccauaggcagagcaauggcuugagcugcucaacuaaggauacuuauuauuauuuc

SEQ ID NO: 55280 - RNA, 61 nt, Homo sapiens
ggaaguuccugaaguucagguaugaaaaaagcaauuggaagauacuggcucgggaauuuuc

SEQ ID NO: 55281 - RNA, 122 nt, Homo sapiens
ggaagaggaugguggccagggguggcauuggcagccacagagagugcuuggcaucugcugacgggccguacgguggauccuggacacucuuggucuacccccacgccacccacacugcuucu

SEQ ID NO: 55282 - RNA, 68 nt, Homo sapiens
ggaagaugaaaggauagucugaugccauguaaaaaauuuaggauaugagauuauaaucuuuuacuucu

SEQ ID NO: 55283 - RNA, 97 nt, Homo sapiens
gcuuuuuauguuccuauagcauuuguacaaaaugcaguaggaguggaaucauuauucuaaauugcauaaguacaaaugaaauggaagagcacaaagc

SEQ ID NO: 55284 - RNA, 71 nt, Homo sapiens
gcuuuuuuuuagaguaagauuuuaccacugugggaaaaacauagcuguuuaauacucuagguuaagagagc

SEQ ID NO: 55285 - RNA, 69 nt, Homo sapiens
ggaaauuguguucuggagauaaagccaagguuguagcuggacaacuuuugcuagugcuuuagaacuucc

SEQ ID NO: 55286 - RNA, 93 nt, Homo sapiens
ggaauccccuuuguagguuucauaguuuauacugauauuucugaugucgucucagagaauuagucacaauuauaggaacucagaaggcauucc

SEQ ID NO: 55287 - RNA, 74 nt, Homo sapiens
ggaaucucacuccuaccacuuaacuaugucacuuaaauuaaccuugugugacugggaguggugaagauaauucc

SEQ ID NO: 55288 - RNA, 63 nt, Homo sapiens
ggaaugacauuccacagccguagaggagccaggcuagccucagcccuguaggagugacguucc

SEQ ID NO: 55289 - RNA, 129 nt, Homo sapiens
ggacauucacuaagcccaucaugcauguuauuagagaguuggcagcauuccagccaagcacauaaagugcuggcaccagaaugacugcagacucucauguccacagcagcuguuaggucugugaugucc

SEQ ID NO: 55290 - RNA, 57 nt, Homo sapiens
ggacauuuugucucaguuucauuaagucuucuuauuugaacacuggacugagugucc

SEQ ID NO: 55291 - RNA, 67 nt, Homo sapiens
ggaccacauuaccuugcuugcuccaacuuuauaguaagucuugaagucagguaauguaauguaauuc

SEQ ID NO: 55292 - RNA, 67 nt, Homo sapiens
ggaccugagggaaaaaauuuauaugagcugacgaaaauguugauggagagaauuauucucucagucc

SEQ ID NO: 55293 - RNA, 90 nt, Homo sapiens
ggagaagcagcauucuauaguccuaggauugggucucagccuuuucgugagccuguguccccagccugugaccuucaugggugcuucucc

SEQ ID NO: 55294 - RNA, 75 nt, Homo sapiens
ggagaaggaaagaaaaaguaaagugcauuugauaaauucaaaugcucucuacacguuucugggcacacuuucucu

SEQ ID NO: 55295 - RNA, 79 nt, Homo sapiens
ggagaaggauguccauuucaaaccucauuugcagcugcuuuuuagucuuagugguuuuggaauggaauucaucugcuuc

SEQ ID NO: 55296 - RNA, 99 nt, Homo sapiens
ggagaaggucucaggagcauauugggucagguauguguggaaaggcccuccaggcucaaauucacacugggccuacucugugcccugacuccaagcucc

SEQ ID NO: 55297 - RNA, 89 nt, Homo sapiens
ggagaaucacuugaaccagggaggcagagguugcagugagccaagguugcgccauugcacuccagccucggcaacaagaaugaaacucc

SEQ ID NO: 55298 - RNA, 89 nt, Homo sapiens
ggagaaucacuugaacccaggaggaggagguugcagugagcagagaucaugccauugcacuccaucuugggcaacaagagugaaacucc

SEQ ID NO: 55299 - RNA, 89 nt, Homo sapiens
ggagaaucacuugaaccugggauggagagguugcaaugagccaagguugcgccauugcacuccaucccgggaaacaagagcaaaacucc

SEQ ID NO: 55300 - RNA, 89 nt, Homo sapiens
ggagaaucgcuugaacccaguaggcggagguuacagugagccaagauggcaccauuguacuccagccuuggggacaagagagaggcuuc

SEQ ID NO: 55301 - RNA, 89 nt, Homo sapiens
ggagaaucgcuugaacccgcgagguggagguugcagugagccaagauugugccauugcacuccagcuugggcaacaagagugaaacucc

SEQ ID NO: 55302 - RNA, 89 nt, Homo sapiens
ggagaaucgcuugaacccgggagguggagguugcggugagcugagauugcgccacugcacuccagccucggcaauaagagcgaaacucc

SEQ ID NO: 55303 - RNA, 89 nt, Homo sapiens
ggagaaucgcuugaaccuggaagguggaguuugcagugagcugagaucgcgccauugcacuccagcuugggcgacaagagcgagacucc

SEQ ID NO: 55304 - RNA, 89 nt, Homo sapiens
ggagaaucgcuugaaccugggaggaggagguugcagugaggugagaucgccccauugcacuccaccuuggguaacaagaacaaaacucc

SEQ ID NO: 55305 - RNA, 89 nt, Homo sapiens
ggagaaucgcuugaagccgggaggcggagguugcagugagccaagauugugccacugcacuccggccugggcaacaagagcgagacucc

SEQ ID NO: 55306 - RNA, 88 nt, Homo sapiens
ggagaaucgcuuggacccaggaggcagagguugcaaugagcugagauugugccauugcacugcuucuugggugucacagcgacacucc

SEQ ID NO: 55307 - RNA, 88 nt, Homo sapiens
ggagaauggcaugaacccgggagguggagcuugcagugagcagagaucacgccacugcacuccagccugggcaacagagcgagacucc

SEQ ID NO: 55308 - RNA, 88 nt, Homo sapiens
ggagaauggcaugaacccuggaggcggagcuugcagugagcugagauagcgccacugcacuccagccugggcaacagagccagacucc

SEQ ID NO: 55309 - RNA, 89 nt, Homo sapiens
ggagaauugcuugaacccaggaggcggaagguacagugagcugagaucacgccauugcacuccagcucugggcgacagagcaagacucc

SEQ ID NO: 55310 - RNA, 89 nt, Homo sapiens
ggagaauugcuugaacccgggagguagagguugcagugagcugagaucgcgccauugcacuccagccugaccaacaagaacgaaacucc

SEQ ID NO: 55311 - RNA, 88 nt, Homo sapiens
ggagaauugcuugaaccugggaggcggggguugcagugagccgagauugugccacugcacucccgccugggugacagagcaagacucc

SEQ ID NO: 55312 - RNA, 88 nt, Homo sapiens
ggagaauugcuugaucccgggaggcggagguugcaguaagccgagaucgcgccacugcacuccagccuuggcggcagagcgagacucc

SEQ ID NO: 55313 - RNA, 71 nt, Homo sapiens
ggagagaagagaaauuguucacauuccaugcuguuuuucuggcauggaaugugaauaacuuccuucacucu

SEQ ID NO: 55314 - RNA, 74 nt, Homo sapiens
ggagagaagagaugcagccacucagggagcccagaccugggagcuccccgagcccaggcugugacucccucuuu

SEQ ID NO: 55315 - RNA, 71 nt, Homo sapiens
ggagagcuggcuuucuccugaucucaggccuggauacugcccgccagggugucgggagaagccaccuuucc

SEQ ID NO: 55316 - RNA, 97 nt, Homo sapiens
ggagauaacaguucaccaacuaugugcacaugcccuggugacuguaucccacuauguggcaccagguuguguguuuauuugccgaggcucuuucucc

SEQ ID NO: 55317 - RNA, 64 nt, Homo sapiens
ggacucugcugguuuuguucacugcuguauccccggagcccagaacagugcuuaguagauguuc

SEQ ID NO: 55318 - RNA, 78 nt, Homo sapiens
ggagaaaagcccccaugauucaauuaucucccacugggucccucccaugacagguuggaauuaugggagcugcaauuu

SEQ ID NO: 55319 - RNA, 68 nt, Homo sapiens
ggagaugcuguguugcuggcuuaaagauggagaaagagauccaugagccaaggaauacagcagccucc

SEQ ID NO: 55320 - RNA, 97 nt, Homo sapiens
ggagauggacaagauguagaacacugaguucagggucagcccaggacagcuccuaacagccugacauguacuuauuuguuuucucuugucuauuucc

SEQ ID NO: 55321 - RNA, 60 nt, Homo sapiens
ggagauguccuaagugguuaacucuauugaaagagucacauaagugcauaggauauuucu

SEQ ID NO: 55322 - RNA, 60 nt, Homo sapiens
ggagauguccuaagugguuaacucuauugaaagggucacauaagugcauaggauauuucu

SEQ ID NO: 55323 - RNA, 69 nt, Homo sapiens
gcuacugugcaaaaaugaauauuguaauauuaaaagagaaacuaauuguucaguaucauugcacauagu

SEQ ID NO: 55324 - RNA, 84 nt, Homo sapiens
gcuaguguaggcagccagcuguggauugaagaguuugcugagucaauugguauaaauuuggauccaaggcuggccuaugauagc

SEQ ID NO: 55325 - RNA, 57 nt, Homo sapiens
gcuaacaaguuucuugguucuccagcuugcacguggccuauuaugagacuucuuagc

SEQ ID NO: 55326 - RNA, 69 nt, Homo sapiens
gcuaagauuucagcuugauguuauuaguuaucauguuaaugauaacagauaaugucaguuaucaugggc

SEQ ID NO: 55327 - RNA, 72 nt, Homo sapiens
gcuaagcuucauacaguggcugcacuccagccaguaaaaaggcuggagugcagucacuguguguagcuuagc

SEQ ID NO: 55328 - RNA, 74 nt, Homo sapiens
gcuauugucacauugaugcccaugguggaugggcuaagcauaggcagccaucaggggcuucggguggagauagu

SEQ ID NO: 55329 - RNA, 86 nt, Homo sapiens
gcuauuuucaaauaucccaauguaauaucacaaagguuuaaucaagucauaucugugugaugaaaaacauggguuugaaaaauggu

SEQ ID NO: 55330 - RNA, 81 nt, Homo sapiens
gcuauuuuguuuuauacuguuuuacaucauugccuuuccccucuaauagagugugaucucuaaaacaggaaagacagcagc

SEQ ID NO: 55331 - RNA, 88 nt, Homo sapiens
gcucaaaauaauccuuauccaaaguggcauauuauaggguagcauauucugaucuucuauaacagugugguuuggagauugauugagu

SEQ ID NO: 55332 - RNA, 105 nt, Homo sapiens
gcucaaagaggugagguaacucucccaggguuccacgccuggcugugugcaugaccugcuacaaccagcaugaaaccuugagcagguuacuucacuucucugagc

SEQ ID NO: 55333 - RNA, 66 nt, Homo sapiens
gcucacaaagaaauuccugucuucucuuuagguaauccacagaugacuagaaauuauuuagugagc

SEQ ID NO: 55334 - RNA, 80 nt, Homo sapiens
gcucaguguguuguugauugaauuuacuuuucauucuaaugaacuugagaacauuaauaguuaauuuugccaugcugagu

SEQ ID NO: 55335 - RNA, 75 nt, Homo sapiens
gcuccccuaucacuguaaguuuacacuuuguagcuaauuuagcuacaaaguguaaacuuacagugacaggagagu

SEQ ID NO: 55336 - RNA, 67 nt, Homo sapiens
gcucuuuguaugucaugacaacugugccaauuauuuuuggcacaguucacuuuuuauaucaaagagc

SEQ ID NO: 55337 - RNA, 68 nt, Homo sapiens
gcugaacuguuucuggugaaagaguagccuuccuucgcgggcacugacacugagggaagcagcucagu

SEQ ID NO: 55338 - RNA, 112 nt, Homo sapiens
gcucuccuugggccuuagugucagcucuaaagauuuauaaagguugcacuggaaccucuuuccaguuguuauuuuuauaaaggaucagugacauuuugaggcagauaagagc

SEQ ID NO: 55339 - RNA, 65 nt, Homo sapiens
gcugacucaguagguaagacauugccacucacaaggguaagugcuguguuguuaccuaaggcagu

SEQ ID NO: 55340 - RNA, 57 nt, Homo sapiens
gcugacucaguuucucagguaguaaucuacuauagacugcugccaaacuggggcagu

SEQ ID NO: 55341 - RNA, 58 nt, Homo sapiens
gcuggagggcaggggugugaccauaguucacuguagccucaaauucuuggccuccagc

SEQ ID NO: 55342 - RNA, 82 nt, Homo sapiens
gcuggagugcagugacaguggagacuuacuucagccuccaccucccaggcucaagugauucucaugcuucagccucuccagu

SEQ ID NO: 55343 - RNA, 85 nt, Homo sapiens
gcugaccuggugcuguagccugauugaggggcacagccuuuuccccagucuuggugucuguagcacguauguucuuagucucagc

SEQ ID NO: 55344 - RNA, 129 nt, Homo sapiens
gcugcuaagaugagucucuagaucacuugucaucauuauguuguguggcugauaaagacuuuaucuuuaaugcaucccaaaauguaguugcugacuucccuguauuucuuuauucacucauuuuuucau

SEQ ID NO: 55345 - RNA, 81 nt, Homo sapiens
gcugaggcaggagaauggcgugaacucgggagguggagcuugcagugagccaagaucgcgccauuguacuccagccugggc

SEQ ID NO: 55346 - RNA, 72 nt, Homo sapiens
gcugcauaggaucuguguggacacuucagucuucucucccacuugcuggccccuccccgggucuagugcagc

SEQ ID NO: 55347 - RNA, 75 nt, Homo sapiens
gcugccuuuuccccgauuuaaaccuuaucacaguccuuggagggugagauaaggaaauugaggcucagggacagc

SEQ ID NO: 55348 - RNA, 73 nt, Homo sapiens
gcuggccauggcccugggcugggcgaacaugcucuacuauacgcgggguuuccaguccaugggcauguacagc

SEQ ID NO: 55349 - RNA, 75 nt, Homo sapiens
gcugggaaacguucaugcagacacacauggaacucaauuagacugggucagugugauaucugcaggggcucuagu

SEQ ID NO: 55350 - RNA, 74 nt, Homo sapiens
gcuggaugcuucuuggcgaucauggcaguagccuccugaaugauagucuugagaagcauuuugacuaacccagu

SEQ ID NO: 55351 - RNA, 77 nt, Homo sapiens
gcuggcaaaugugguguuugagcugccagggaucaucagggucucucugcagcccgggacacugcauauauucuagc

SEQ ID NO: 55352 - RNA, 107 nt, Homo sapiens
gcugggggcuccugggcugugcauggagaaggggacugauucagagacaccaacaacucacaccuggacgugcucccaucuccaccugugcgcccaccucccucagc

SEQ ID NO: 55353 - RNA, 55 nt, Homo sapiens
gcugggaggcuguuggggugaucuaagcaagagauuauaacaguuuggacccagu

SEQ ID NO: 55354 - RNA, 76 nt, Homo sapiens
gcgucacagugaaugucaucauugccuagcgacuguuccuccggcuuggcagagaaggagacauucaugaagaugu

SEQ ID NO: 55355 - RNA, 82 nt, Homo sapiens
gcgggaaaaucugacagucucauugauuugcucucuuugccaucaccacucuugagaggaagaaaugugacuucaaacuugc

SEQ ID NO: 55356 - RNA, 89 nt, Homo sapiens
gcgggaacaucaggauggauggacagacacuggccuucuggaagguucaacuccagcagggaagcugugcuguuucacaaauuggcugc

SEQ ID NO: 55357 - RNA, 98 nt, Homo sapiens
gcgaucacggguuuuggcagugcccgaugcuggggcuugggucugaugugaccccgauuccuucuccagugcgggacucccgccgcccuaacuuucgc

SEQ ID NO: 55358 - RNA, 63 nt, Homo sapiens
gcgaaugugggaguccacugcccggcagauggagagagccucugcggguguggacccuagugc

SEQ ID NO: 55359 - RNA, 125 nt, Homo sapiens
gccuuccaaagugcugggauuacaggcaugagccacugcacuuauccuccaauguuuuaauaaauaauaaagcauuuaggccggaugcagugucucaugccuguaaucccagcacuuugggaggc

SEQ ID NO: 55360 - RNA, 77 nt, Homo sapiens
gccuuguaguauaguuugaagucagguagcaugaugccuccagcuuuguucuuuuggcuuaagauugacugcaaggc

SEQ ID NO: 55361 - RNA, 89 nt, Homo sapiens
gccuuugguuuggaauccuuguagccacaaguggugaggaaguuuaaaagcgcuuugguggcuugauggcacaagguuucugaaugggc

SEQ ID NO: 55362 - RNA, 91 nt, Homo sapiens
gccuuuguuucuucaucugucaugugaggauaacaauagugcccaucuuguagggugguugugagacuuaaaugagaugauggagcugggc

SEQ ID NO: 55363 - RNA, 82 nt, Homo sapiens
gccuuuuacgcacacugcaguaaauugcgucgguucauuuacucacagaacaagcacagacaaugcugcaguuuagaaaggu

SEQ ID NO: 55364 - RNA, 63 nt, Homo sapiens
gccuuuuuuauguugagauauauucuuuccauacuuuguugaguguuuuuaacaagaaagggu

SEQ ID NO: 55365 - RNA, 88 nt, Homo sapiens
gccugugcgcauguguggguuugugugagugcccauguaugcacacguguauaugcauguacccacacaggcccaucuccucacaggc

SEQ ID NO: 55366 - RNA, 62 nt, Homo sapiens
gccuggagugcuggaaggaguuuucuagguuuucuuguucuacccucuaguuuucaacaggc

SEQ ID NO: 55367 - RNA, 80 nt, Homo sapiens
uaaguggugugacucauagcucucaguuuuugguagacagcugaagccagagaacauucagagcuguagacaaacacuua

SEQ ID NO: 55368 - RNA, 73 nt, Homo sapiens
uaaguuaauguuuaagacuccuauuacuaauaauaauugaaacaguaauaggaguaguaguagcauuaauuua

SEQ ID NO: 55369 - RNA, 86 nt, Homo sapiens
uaaguucuaggguacacgugcacaauaugcagguuuguuacauauguauacaucugccauguuggugugcugcacccauuaacuug

SEQ ID NO: 55370 - RNA, 86 nt, Homo sapiens
uaaguucuaggguacaugugcacaacaugcagguuuguuacauauguauacaugcgccauguuggugugcuguacccauuaacuug

SEQ ID NO: 55371 - RNA, 86 nt, Homo sapiens
uaaguucuaggguacaugugcacaacgugcaaguuuguuacauauguauacaugcgccauguuggugugcugcacccguuaacuug

SEQ ID NO: 55372 - RNA, 86 nt, Homo sapiens
uaaguucuaggguacaugugcacaacgugcagguuuguuacauauguauacaugcgccauguuggugugcugcacccauuaacuug

SEQ ID NO: 55373 - RNA, 86 nt, Homo sapiens
uaaguuuuaggguacauguguacaacgugcaguuuuguuacauauguauacaagugccauguuggugugcugcacccauuaacuug

SEQ ID NO: 55374 - RNA, 67 nt, Homo sapiens
uaauaacuaugugaggugcugaauauguuaauuacuuugauugacauaaucauuucacaguguauua

SEQ ID NO: 55375 - RNA, 73 nt, Homo sapiens
uaacucacaguuuguuguuuuuauuucucacuucccuggugagaggugaaggucucaauaaauaaguaaguug

SEQ ID NO: 55376 - RNA, 82 nt, Homo sapiens
uaagagacuuaagcauccguggauuuugguaacugaggguggauccuagaaccaaucccacauggauacuuaucauuucuua

SEQ ID NO: 55377 - RNA, 79 nt, Homo sapiens
uaagagaguuaaagaauaagaaacaaagucuguauauuuacccauacaguugccauuucuugugcuugucauuuucuua

SEQ ID NO: 55378 - RNA, 107 nt, Homo sapiens
uaagcacucauuuugguugaguucauaugcaggagcggaauuucuucgucauagaaugaaauguauguuuggcuuuuguaauaacugccaaagugauuauguguuua

SEQ ID NO: 55379 - RNA, 89 nt, Homo sapiens
uaagcucuaugagaacaggaauuucuguugguguugugcauugcuauaucaccagcaccaauaacaguuucuagcauauacuaggcuua

SEQ ID NO: 55380 - RNA, 63 nt, Homo sapiens
uaaggaggcugcugugaagaaaggacaugcaauuccuccugccaucacacuguggcuucuuua

SEQ ID NO: 55381 - RNA, 81 nt, Homo sapiens
uaaggugacuaaagugaggauggcaguagguuuggauuccuuauuuacuuacuucuaguuugucacuucucagucaccuug

SEQ ID NO: 55382 - RNA, 75 nt, Homo sapiens
uaagguugaaagcuacaggaaaguauuuucacuaacaaagggugaaaauaauguaaguauuuuuaaaaacccuug

SEQ ID NO: 55383 - RNA, 60 nt, Homo sapiens
uaagugaaggaaguguguuuacaaaugucauuuuugucugauuucacuuaccuucauuua

SEQ ID NO: 55384 - RNA, 55 nt, Homo sapiens
uaagugaauauggacaguuagcauuuagcaacauguaucugucuacuuucucuug

SEQ ID NO: 55385 - RNA, 64 nt, Homo sapiens
uaaauaacucucguuuaugccuaguguuccauuauuggaaugcuaagcaugugggaauuauuug

SEQ ID NO: 55386 - RNA, 82 nt, Homo sapiens
uaaagauuagagaugaguuagguaauaauaaauaugguauuuuuucuagauuugguagcauuuaacagguuucucagcuuua

SEQ ID NO: 55387 - RNA, 75 nt, Homo sapiens
guuuuagacuauuuuguuuccuugucauuucaauggaauuuggaagagaagggagauaaacauauauguuuaggc

SEQ ID NO: 55388 - RNA, 65 nt, Homo sapiens
guuuuaggguacaugugcacauugugcagguuaguuacauaugaguacaugugccaugcuggagc

SEQ ID NO: 55389 - RNA, 68 nt, Homo sapiens
uaaauaguagcugaaugagggaacagaguugcaaauguuuucccuguuugucauuuaucuuuuguuua

SEQ ID NO: 55390 - RNA, 79 nt, Homo sapiens
uaaaugcuuaauugaauguggaacucaacugugcauuaucuaugcagauguaauauuguucacguuuguugaguauuua

SEQ ID NO: 55391 - RNA, 94 nt, Homo sapiens
uaaaugucauuucuuuaaggaucaaaagugugaauaauaaguaaauauguuuuuucaagcuauggugaucuuuuccaagggauggugauauuua

SEQ ID NO: 55392 - RNA, 119 nt, Homo sapiens
uaaauuccuuuaauagauauagggauacucugguuauauauuucuucaugaguaaucuuugguaguugaugucuuucauggaauauugaccauuuuaucuaaguuguugagcuuauuua

SEQ ID NO: 55393 - RNA, 68 nt, Homo sapiens
uaacaaaugcaccacucuggugcaggauguugauaguaacaaaugcaccacucuggugcaggauguug

SEQ ID NO: 55394 - RNA, 69 nt, Homo sapiens
uaacaaggaaacaacuauaauucauuuuaauaaggugcuuguuaaauacagcaugguguuucuguguug

SEQ ID NO: 55395 - RNA, 89 nt, Homo sapiens
uaacaggugugaaguaauguuuuauucuauuuuguauuugaauuucucuggugauuaaugauauugaacaucuuuucauauaccuguug

SEQ ID NO: 55396 - RNA, 59 nt, Homo sapiens
uaacauagucauauacuugcuugaguuuucacauagggcacaggaaaugacucauguua

SEQ ID NO: 55397 - RNA, 70 nt, Homo sapiens
uaccugcagagaaacauuuuguauuuucaauaaauggugcuggaaaaacugaaauauuucucuguaggua

SEQ ID NO: 55398 - RNA, 78 nt, Homo sapiens
uacucuugucacuguuuccuauuauauuugggugauucaguauaacagaagaauguaauaggaaacguguggagggug

SEQ ID NO: 55399 - RNA, 82 nt, Homo sapiens
uacugguuugaguucuuuguagauucuguguauuaguccuuugucagaugcagacuuugcaaagauuuucuccugcucugug

SEQ ID NO: 55400 - RNA, 78 nt, Homo sapiens
uaaucacuucuagcuuuugauguaaagugagagacaugcaacucuucacuugaaugcuuagaggccacuguaggauua

SEQ ID NO: 55401 - RNA, 72 nt, Homo sapiens
uaaucagucuaauagcauuuauuggcugcuuaccaaguucuggacacugaucuaagugcuuuauauugauua

SEQ ID NO: 55402 - RNA, 78 nt, Homo sapiens
uaccauagguaaugaaugcuaccagcaucuaguggguaguagugagagcccagggaugcugcuuagcauccuacggua

SEQ ID NO: 55403 - RNA, 86 nt, Homo sapiens
uacccagaaagacacauggccucccgcauuugccguuuaucucugcagacaggaaagcuagguguggguguacuguggaucgggug

SEQ ID NO: 55404 - RNA, 59 nt, Homo sapiens
uaauguuaguuuuccauacaugguuaucuuuuaaggauagcaguaagaaacugacauug

SEQ ID NO: 55405 - RNA, 74 nt, Homo sapiens
uaauuaugguuucauuaugaugcaccauaucagggcuguuguaaugucaugucugcacauaguaaaaauaguua

SEQ ID NO: 55406 - RNA, 66 nt, Homo sapiens
uaauucuauuagugccuaagucuuaggggcugacaauuaggcucuaagggaggcauaguauaauua

SEQ ID NO: 55407 - RNA, 78 nt, Homo sapiens
uaauuuaaugucaggcaccgauacaguuuuuugugguuguucagaaacgagaaaggugugugguucugaagugaauua

SEQ ID NO: 55408 - RNA, 73 nt, Homo sapiens
uaauuuugauguguugggaagauuucaaguccucucuccuggcuauuuugaaauacaccauacauuguuguua

SEQ ID NO: 55409 - RNA, 67 nt, Homo sapiens
uaauuuugucauuuucagaguguuacgugaaucuuucaguauguaaccuuuuggaauuggcguguua

SEQ ID NO: 55410 - RNA, 82 nt, Homo sapiens
uacaaagaagcugugauuauccacgucuuugugaaugagaaagugacauucaacggacuuacuggagaugauggaauuugug

SEQ ID NO: 55411 - RNA, 88 nt, Homo sapiens
uacacagaaaguguucacagugguugccuuccagaagaacuuugaacuuuuggaaauguuuaaaucaugugcaugaaugaucugugua

SEQ ID NO: 55412 - RNA, 76 nt, Homo sapiens
uacagguacaaugugcacuauuagggugauaguuacacuaaaagcccagacuucaccacugcacaauguaccugug

SEQ ID NO: 55413 - RNA, 63 nt, Homo sapiens
uacaguaaauuucugugcuuucauagagaaaagauauugugggggcacugggaauuuauggug

SEQ ID NO: 55414 - RNA, 56 nt, Homo sapiens
uacagucacauuccugaccauacaucgugaaaauuguguguguguguguguuugug

SEQ ID NO: 55415 - RNA, 69 nt, Homo sapiens
uacagucauaaugccuagugacagagauacguucugagaaaugcaucacuaggugauuuugucauugug

SEQ ID NO: 55416 - RNA, 76 nt, Homo sapiens
uacauaagugcaugauuacaugcauaugcauauaaacaugcagccaugcauauguaugaaugaaugcauaggugug

SEQ ID NO: 55417 - RNA, 63 nt, Homo sapiens
uacauauaaggagacuagggcauagagaagucgaacgacaugcccaaguuuuccuaaugagua

SEQ ID NO: 55418 - RNA, 65 nt, Homo sapiens
uacauauauaagguagaaauagucacaucuguaaugcagugguccugguccccuuuauguaugug

SEQ ID NO: 55419 - RNA, 83 nt, Homo sapiens
uacaucuguauauguuuucauaaggcuagaaggacuuuaaaauauuaucugauuuauuguuguggauagcaugugcuugagug

SEQ ID NO: 55420 - RNA, 57 nt, Homo sapiens
uacauggguggugggaucuguaccucaaaccgcagcauugcacaauauacccaugua

SEQ ID NO: 55421 - RNA, 67 nt, Homo sapiens
uaccaaguauuuucacaugaacaggguagguuuuauauuaacccauuuuucauaugaagaacuggua

SEQ ID NO: 55422 - RNA, 73 nt, Homo sapiens
guugcuuuugcuugaggucuagcuacccuguauagccauguagaacgggaaguacccucaggcaaaaagcagc

SEQ ID NO: 55423 - RNA, 57 nt, Homo sapiens
guuggaacacaaaagagauccuucaaggauuuuacagucuuuugugugagucccaac

SEQ ID NO: 55424 - RNA, 55 nt, Homo sapiens
guuggaauuacaggccugagccacugcgacuggccccauggcuuauaauuuuaau

SEQ ID NO: 55425 - RNA, 60 nt, Homo sapiens
guugggcugaagugugugcuuauaaauguguuuaguuuuuaagcuaaacauucaguuaac

SEQ ID NO: 55426 - RNA, 63 nt, Homo sapiens
guugccuaggcuggagugcaguggcgcgaucucggcucacugcaaccuccgccucccagguuc

SEQ ID NO: 55427 - RNA, 127 nt, Homo sapiens
guugcuagauuuugaaaaguuaggguuuuucucccuauaaaguuaagacagaauguuaagauugcugguauuaauacugcuuaacuuuaggaaaggaauuauaucacccuccaguucuuucuguaac

SEQ ID NO: 55428 - RNA, 70 nt, Homo sapiens
guugcucaggccggagugcaguggcacgaucuugguucauugcaaccuccaccuccuggauuugagcgau

SEQ ID NO: 55429 - RNA, 78 nt, Homo sapiens
guuguacacacuggugaauuuuuauuuaagugacucacuauugaugugacuugugaaaaguucagcauaguuggcaau

SEQ ID NO: 55430 - RNA, 86 nt, Homo sapiens
guuguagcaguguacaccuguggucccaguaacuuggcaagcugaagugaaaggauugcuugaaccuaggaguucaaggcugcaau

SEQ ID NO: 55431 - RNA, 74 nt, Homo sapiens
guuguauguggauuuuucaacugcauggggguugacaccccuaaucccuguguuguucaaggaucugcuauaau

SEQ ID NO: 55432 - RNA, 57 nt, Homo sapiens
guugugaacacagaggcuauggcacggcuucccgugcaagcuucaugguuuacugac

SEQ ID NO: 55433 - RNA, 64 nt, Homo sapiens
guugugaauagugccgcaauaaacaugcgugugcaugugucuuuauagcagcacgauuuauaau

SEQ ID NO: 55434 - RNA, 99 nt, Homo sapiens
guuuaagauuuaguaagacagucauugcauguuaauuaaacagcaauggaucauuuaccaaccuguuuaaugagguguaacaacuauugaauauaaaac

SEQ ID NO: 55435 - RNA, 65 nt, Homo sapiens
guuuagcuuauaucugcagugugaccccagucagguuccaccuauauuugcaauuuaagcuagau

SEQ ID NO: 55436 - RNA, 60 nt, Homo sapiens
guuuugaccuucuaaagugcuguuacuuugccuaaaauggaaguauggaggaggcagaau

SEQ ID NO: 55437 - RNA, 120 nt, Homo sapiens
guuuuuaauauggucaauaguauuaaagcuuggaagccuagauucuuuucuuuugaccccaaguggaaaagaaagucuuccuuguuuguuugcuuuuuuuuuccuugugacugugaaagc

SEQ ID NO: 55438 - RNA, 61 nt, Homo sapiens
guuuuuaguccucugaaaaucuauaauauucuauaauugagagaucggagggauuaaaaau

SEQ ID NO: 55439 - RNA, 59 nt, Homo sapiens
guuuuugggaaggaggagaauuauauguauauagagcugauaucuuuauucccaagagc

SEQ ID NO: 55440 - RNA, 63 nt, Homo sapiens
guuuuuggggucacuauuaccgaaaggguuugacgggccccugaggugauguaccuuaaaaac

SEQ ID NO: 55441 - RNA, 89 nt, Homo sapiens
guuuuuugguagcauuuuuugcuuuauucugcucgugcauauuuuggaaugaggugaguaaauaaaugaaugaacaaacaaauaagaac

SEQ ID NO: 55442 - RNA, 72 nt, Homo sapiens
uaaaaugacauugauaguuuaauaggaauugcauuaaaucuguagauugcuuuggacugucuggccauuuug

SEQ ID NO: 55443 - RNA, 92 nt, Homo sapiens
guuuccuagcuagcaauuucuuggggcaauggaauaggugauugaaagaaugucuaacauucacaugcugcaaaaaugguuaacggggaaau

SEQ ID NO: 55444 - RNA, 106 nt, Homo sapiens
guuuccucauuuguugagugagauaucuagacuagggaaaucuuaaagcuaacagccuucaguucccguguuuuaucuuccaacaucagcaacaaaaacaggaagc

SEQ ID NO: 55445 - RNA, 56 nt, Homo sapiens
guuugucaucaucaucaucaucauaucacuuuuuagggcagugagagaugacaaac

SEQ ID NO: 55446 - RNA, 56 nt, Homo sapiens
guuugucccuuugcaguggcacacagggagcuauguguccacaagaggagacgaac

SEQ ID NO: 55447 - RNA, 74 nt, Homo sapiens
guuuguuuugagacugagucuugcuuugucaccuaagcuggagugccauggcacgaucucaguccacugcaaac

SEQ ID NO: 55448 - RNA, 73 nt, Homo sapiens
guuuguuuugagaugagucucgcucugucacccaugcuggagugcaguggcacgaucucggcucacugcaaac

SEQ ID NO: 55449 - RNA, 98 nt, Homo sapiens
guuucugauucagcagaccaagguugagguuugcauuucuaacauuuguauuucuguuagaacauuccaggugauguuggagcugcugauucagagac

SEQ ID NO: 55450 - RNA, 77 nt, Homo sapiens
guuucuggcauacaguagcuacucaauaacuauuucuggaauaaauaagugaauguuggcuacugaacacuagagac

SEQ ID NO: 55451 - RNA, 125 nt, Homo sapiens
guuugaauguacauuuuuaaaguucuucaauucaugagugguuuuuuucugccuuauagccaguccccacuauauuucagcuagauuuagcaaaagaucagucauugaaagaauacauuucagau

SEQ ID NO: 55452 - RNA, 95 nt, Homo sapiens
guuugaggcugcagugaguuaugauggcaccacugcacuccaaucuggggagcugcagugcaauggugccaucauagcucacugcagccucgaac

SEQ ID NO: 55453 - RNA, 73 nt, Homo sapiens
guuugauauguaacuacuccuuauaugccauuuuauuuugugcauacaugugauuguaguauacauauuaggu

SEQ ID NO: 55454 - RNA, 69 nt, Homo sapiens
guuugcaacauaguccuauguagugauuuuaaugauaucgcauacuuuacacauggauuuugugcaaac

SEQ ID NO: 55455 - RNA, 62 nt, Homo sapiens
guuugcauaagugcauucugugauguucacacgaugaaaucacgugaugcauuugucagaac

SEQ ID NO: 55456 - RNA, 57 nt, Homo sapiens
guuugccuuuuagauaggaaugcugaaaauaaugagacacuucugucuggaggaaac

SEQ ID NO: 55457 - RNA, 77 nt, Homo sapiens
guuuggaaaccuguagccacagguggcgaggaaauuaaagagugcuuggguggcuugauggcacaagguuucugaac

SEQ ID NO: 55458 - RNA, 78 nt, Homo sapiens
guuuggaaaccuuguagccacagguggcuaggaaauuuaagagugcuuggguggcuugauggcacaagguuucugaau

SEQ ID NO: 55459 - RNA, 78 nt, Homo sapiens
guuuggaaacuuuguagccacagguggugaggaaauuuaacagcgcuuguauggcuugauggcacaagguuucugaau

SEQ ID NO: 55460 - RNA, 124 nt, Homo sapiens
guuuauaugcugauaucaacucugcccugguugauuuuuauucuaggguauuugcagaguucccacuuucaaaugcacguagagaaaauaauccccaucaggacaucuggcauuguuuuuaaac

SEQ ID NO: 55461 - RNA, 67 nt, Homo sapiens
guuuauuacaguagaugaggguauaaugguacaagcugucacaauaccauucauuuacucaacagac

SEQ ID NO: 55462 - RNA, 62 nt, Homo sapiens
guuuauucuucaagaaccuagcugaccaagugguacacaugauaagugcuugaugaaugaac

SEQ ID NO: 55463 - RNA, 90 nt, Homo sapiens
guuucacaguaggucugccccgggugaugcagccgucagucgggggccccugugugaagcggccgucauccggggaccccugugugaagc

SEQ ID NO: 55464 - RNA, 55 nt, Homo sapiens
guuucaggcaccauggucauugauaacaucuuaucaggagacaggguuuugagau

SEQ ID NO: 55465 - RNA, 55 nt, Homo sapiens
guuucaggcaccauugucauugauaacaucuuaucaggagacaggguuuugagau

SEQ ID NO: 55466 - RNA, 56 nt, Homo sapiens
guuucaggcaccauugucauugauaacaucuuaucaggagacaggguuuuugagau

SEQ ID NO: 55467 - RNA, 86 nt, Homo sapiens
guuucagguaaaugauauuuuauguaaguacaccgcaaauauugcauggauauacuuguacuucaagauuaugguuuaucugaaau

SEQ ID NO: 55468 - RNA, 84 nt, Homo sapiens
ucaaggaaaugaguaguugcuaaauauugaguuaauauguuauacauuccuucucagugauuacagaauacuuauaucaaauga

SEQ ID NO: 55469 - RNA, 77 nt, Homo sapiens
uauucacaagaguuucacugcaaacugacuuuucagggcaaauucaccacccaaaagucuguagugaaaggugaaug

SEQ ID NO: 55470 - RNA, 86 nt, Homo sapiens
uauucauuaaauuccuuccaguugugagcuauccgggcuuuaagggaccugaagcucaaaugacuuggggaggcuuuuaaggaaua

SEQ ID NO: 55471 - RNA, 66 nt, Homo sapiens
ucaaaccauauaaucgguuacacuacaauucaaaacaaauuagggugaaagacauauaugguuuga

SEQ ID NO: 55472 - RNA, 106 nt, Homo sapiens
ucaaacgugucauucuuucccucuguggcuaagacaaccuuuccugucucccaagauuacaugaaagguugucuuaagccauagagggaaagaaugacauguuuga

SEQ ID NO: 55473 - RNA, 99 nt, Homo sapiens
ucaaauaggaaaagauuuuagucuuuucaguuugucaggauguaauaaaaaugcaaugaauagacacuaaagacuguauuuuuuaaaucuuuuuuuuga

SEQ ID NO: 55474 - RNA, 58 nt, Homo sapiens
ucacaguucagcauggcugaggaguccucaggaaacuuacaaucauggcugaacguga

SEQ ID NO: 55475 - RNA, 71 nt, Homo sapiens
ucaaguagcagaacauguuccuuguaaaugcuaaaccauaacagcuauagaucaugugucugcccuuuuga

SEQ ID NO: 55476 - RNA, 93 nt, Homo sapiens
ucacacuaucacacccaggcuagagugcagguguaugguuacagcucacuguugauugcacaccugcacucaagccaugaugugacagaguga

SEQ ID NO: 55477 - RNA, 56 nt, Homo sapiens
ucacacuguuuugauuauuauaacucuguauuaaguuuugaaaucaggaaguguga

SEQ ID NO: 55478 - RNA, 66 nt, Homo sapiens
ucacaggguguuauuagaauuaaaucaaauaaugaauuaucacagugcucuguaacauccuguuga

SEQ ID NO: 55479 - RNA, 60 nt, Homo sapiens
ucaccaauacuuauuaucuuuugucuuuuugauaacagccaucugauaagugugagguga

SEQ ID NO: 55480 - RNA, 62 nt, Homo sapiens
ucacgauacuauucucauucuccauaucuuacuggauuuuggaggacaagcauggauaguga

SEQ ID NO: 55481 - RNA, 129 nt, Homo sapiens
ucacauuuuauacacuguuagggcugaacugugucuccugaaaauucacauguugaaacccaaagccauaccucagaaugugacuuauuaggagacacagccuccaaagacgugauuaaguaaaaguga

SEQ ID NO: 55482 - RNA, 62 nt, Homo sapiens
ucaccauuucaagugcugucuuagcugugacugguuuucagugacacuaaccacuuggguga

SEQ ID NO: 55483 - RNA, 70 nt, Homo sapiens
uauuuguuagugaaugcaccacuucugacuacugcuccaagggguuagauggauaauucuuuaggaagug

SEQ ID NO: 55484 - RNA, 120 nt, Homo sapiens
uauuuuagagacagggucucacucuguugccuaggcuggauugcaguggugcuaucauagcucacugcagccuccagcuccugggcucaagugauccucccaccuuggccuccuaaagug

SEQ ID NO: 55485 - RNA, 72 nt, Homo sapiens
uauuuuccuuuuauacucgucugaaugauucuuugaaagagaauguuuucaugagaaugaauaggggaaaua

SEQ ID NO: 55486 - RNA, 58 nt, Homo sapiens
uauuuucuuuaaagguuaaaucauaguuauugcuaugauaaguuauuagaagaagaug

SEQ ID NO: 55487 - RNA, 88 nt, Homo sapiens
uauuuuuugaggaugucaacaaaauuauucuaaguccuuuguggauuggcaaaggaacuggaauauuuugaacaauuuuuaaaaagug

SEQ ID NO: 55488 - RNA, 66 nt, Homo sapiens
uauuucuaguucuagauccuugaggaaucaccacacugucuuccacaaugguugaacuaguuuaua

SEQ ID NO: 55489 - RNA, 55 nt, Homo sapiens
uauuucuuucuugauauuuuggcugcucauaaugucaguuacugagagagaagug

SEQ ID NO: 55490 - RNA, 58 nt, Homo sapiens
uauuuggaaacaauucacaugcuuuuucugucuuuguaggcaugugaauguucaaaua

SEQ ID NO: 55491 - RNA, 84 nt, Homo sapiens
uauuuauauuuguauuaacuaucuccacagaagucauuugcaacaaauugaauggaacuggagaugguuauauuaaguaaaaua

SEQ ID NO: 55492 - RNA, 55 nt, Homo sapiens
uauuucaguugcguuucccgaguagccccagcaacaggagaagcaucuagaaaua

SEQ ID NO: 55493 - RNA, 65 nt, Homo sapiens
uauuucaguugugcagguaguuugcauuuuaaaucaucucacacaacuugcuggaaacugaaaug

SEQ ID NO: 55494 - RNA, 86 nt, Homo sapiens
uauucuacugucuaugucuuggaaaguuguuguaguuauuauuuuugauuaguacaugauugaaucuuucuaugaagauaagagua

SEQ ID NO: 55495 - RNA, 80 nt, Homo sapiens
uauucuguaugauacuguaacagugggugugccucaugacacauuagugaaaacccagugaauguacagcauaaagagug

SEQ ID NO: 55496 - RNA, 55 nt, Homo sapiens
uauugaacgugggauauugaagucucuaagagacuucaauaucccacguucaaua

SEQ ID NO: 55497 - RNA, 58 nt, Homo sapiens
uauugcacuccucaugcauuuggugauccuugacugugugcauuuuugaguugcaaug

SEQ ID NO: 55498 - RNA, 62 nt, Homo sapiens
uauugcagugagauccaucuggugaaguaagaaaacauuuggugaaaaugucaccugcaaua

SEQ ID NO: 55499 - RNA, 55 nt, Homo sapiens
uauguucaucuugugcucaguaaauuugcacuuugccuaguagaaggugaacaug

SEQ ID NO: 55500 - RNA, 88 nt, Homo sapiens
uauguugaauagaaguguugaaaguggacauccuugucuuguuccaguucucagggggaaugcuuucaacuuuuccuuguucaauaua

SEQ ID NO: 55501 - RNA, 122 nt, Homo sapiens
uauuaauugcacugugguuuaguaagggaauaagaugauguucuuuuucuuaggagaucuaugaugaaguauuuuaagguaaaggaacaucauaucuacaaccuacucccaguaguauagua

SEQ ID NO: 55502 - RNA, 77 nt, Homo sapiens
uauuagguuggugcaaaaguaauugugguuuuugccauuauuuucaaagcugcauuuacuuuugcacaaaccugaua

SEQ ID NO: 55503 - RNA, 84 nt, Homo sapiens
uauuagguugguggaaaaguaguugcgguuuuugccauuaaaaguaaugaccaaaaucgcaauuauuuuugcaccaacuuaaua

SEQ ID NO: 55504 - RNA, 121 nt, Homo sapiens
uauuauauaucccugaaaucuaaaguggauaacacauguggagagagaaugacuuaucugauuaaaagaaugaugucauuuuaauuucuaaucaauguguugguuacuaggauguauagua

SEQ ID NO: 55505 - RNA, 56 nt, Homo sapiens
uaugccuuuuggcucaagaaacauugccauauauguugcuugaaccaaaaggcaua

SEQ ID NO: 55506 - RNA, 77 nt, Homo sapiens
uaucuagccuaugaagcuuguccagccuagaagauauuaagaugggcauuaauguacucauuucauaggguuaggug

SEQ ID NO: 55507 - RNA, 62 nt, Homo sapiens
uaucucauccuccuugaucccauccccaucaaaacuagagauugaaauaaggagaugagaug

SEQ ID NO: 55508 - RNA, 62 nt, Homo sapiens
uaugcuguuuuguagcucccucuuuucacuaacccacuacaagauggggcaagaagagcaua

SEQ ID NO: 55509 - RNA, 60 nt, Homo sapiens
uauggauuuuuuugacaagagcgucgaugcuuuccauuggguucuuaaaaaggaucuaug

SEQ ID NO: 55510 - RNA, 86 nt, Homo sapiens
uauggucucagaacugucauaaauugcacuggaaguaacugagcgcaugccagugugcgagaguguaauuggccuugagaacuaug

SEQ ID NO: 55511 - RNA, 58 nt, Homo sapiens
uauguaacaccguggucauagcauuuauaagauuguacugugauuauuuaguugcaug

SEQ ID NO: 55512 - RNA, 129 nt, Homo sapiens
uauguauaucaaauaguuauuccuuuuuauuacugacuagcauuccauuguauaacacaguuuguuuauccauucgccuguugauagacaucugaguuguugccuguuucuggcuguuuuaugaacaug

SEQ ID NO: 55513 - RNA, 76 nt, Homo sapiens
uaugucagagagaagauuuggugcucaaaggccgcuguucagauucuuuugucccauggggucuuccuuugaugua

SEQ ID NO: 55514 - RNA, 66 nt, Homo sapiens
uaugucaugggguuuuugagauaacuaaauuauuuacguaaguugcugaagacacugcauggcaua

SEQ ID NO: 55515 - RNA, 72 nt, Homo sapiens
uaggguaguacagagaguguccuaaagggccaagcacacaggugagauuaugacacuccugugcgcacccug

SEQ ID NO: 55516 - RNA, 58 nt, Homo sapiens
uaggucaguuuuggcuuggcuuggcugagauuggcuggguuugucuagacuggcucua

SEQ ID NO: 55517 - RNA, 74 nt, Homo sapiens
uagguugucuuucaggguuuuuauaguuuuagguuuuacauuuaagacuguaauccaucuugaguuaauuucug

SEQ ID NO: 55518 - RNA, 76 nt, Homo sapiens
uaguacuaauauaauagcaguguuacuaggacugauaccauuaguuauaguacuaguacugcuugcaguaguacua

SEQ ID NO: 55519 - RNA, 100 nt, Homo sapiens
uaggacaacauuucuuuuuguagcuuuugagauuuauauuucuguuggguguuaaaauuucaaaggugaguaacuauuuacaugagggccaauugguuua

SEQ ID NO: 55520 - RNA, 81 nt, Homo sapiens
uaggcauugaacuaucccuguucauggugauuuucagaauaagacugagaugugaucaccugaaggguguccuaaugcuua

SEQ ID NO: 55521 - RNA, 57 nt, Homo sapiens
uaggccaguauuuuauugagaauuuuuugcguugauguucaucaggauauuggucua

SEQ ID NO: 55522 - RNA, 71 nt, Homo sapiens
uagggaugagguaucauuauguugcccaggcuggucuugaacuccugggcucaagugauccucucgccuug

SEQ ID NO: 55523 - RNA, 96 nt, Homo sapiens
uagggcaauagcucagcagugcagcaucaaaucacacaagaugcuggucccuucugaaucuuguauuuugguagcuaugccugagcccuugccuua

SEQ ID NO: 55524 - RNA, 129 nt, Homo sapiens
uagucugcaccucaaagcguugcugugaagauuaaaugagcuaauauggguaaguugcuuaguucagcaccuccucaacucucauuguuaguucuugauagaaucaucaaugcgguaagaugcauacua

SEQ ID NO: 55525 - RNA, 83 nt, Homo sapiens
uagugguuccuuuuaguggacaaagguauuuagaaaccaagaucuagaugccaguuguguucacugcuacagggguaucacug

SEQ ID NO: 55526 - RNA, 75 nt, Homo sapiens
uaguuacagucacaauuuguaccuuuuucuccacuccaaacugagacuaagagggaaauuguuggcugcuaacug

SEQ ID NO: 55527 - RNA, 98 nt, Homo sapiens
uaguuggauuacugucacucauccauacuuacuguuaucaugcuuucucuuggugcuagauagcaggagaauggucaugggcauuugcggaucagcua

SEQ ID NO: 55528 - RNA, 77 nt, Homo sapiens
uaguuuacugagaaugaugauuuccaauuucauccaugucccuacaaaggaaaugaacucaucauuuuuuauggcug

SEQ ID NO: 55529 - RNA, 77 nt, Homo sapiens
uaguuuacugagaaugaugauuuccaguuucauccaggucccugcaaaggacaugagcucaucauuuuuuauggcug

SEQ ID NO: 55530 - RNA, 71 nt, Homo sapiens
uauacauguaauugauuuuguguuagccagucaugucauguuugacuaacacugaaaaugaugcaugugua

SEQ ID NO: 55531 - RNA, 72 nt, Homo sapiens
uauacuagucaagaauguaugaggaaacagaauucauucuucugggcauuuauaacauuucuuaccugugua

SEQ ID NO: 55532 - RNA, 70 nt, Homo sapiens
uauacugucuuuguaugccuagaagugcagcuaucucuuuguuaacacuaguuuuaugcaaggcaguaua

SEQ ID NO: 55533 - RNA, 125 nt, Homo sapiens
uauagcacucaaaacugucaagcuguaacagcaucacugugauuucuacugugcugagcagcagugugaagcaaggagagcaucacauauggucgcuguuguagcuacucagcuuagguguugua

SEQ ID NO: 55534 - RNA, 63 nt, Homo sapiens
uauagcagccugaacaaaguaaggaaaaugguaacauuuaguacuuuugacacaggcccuaug

SEQ ID NO: 55535 - RNA, 90 nt, Homo sapiens
uauagcuaccacaaauaacacuguuuccagucaugaucaggaaucacauauuaagacauaacugcaaauugugcuauacuggguacugua

SEQ ID NO: 55536 - RNA, 79 nt, Homo sapiens
uauauuaaucugguagucaucaaaguauaaaugauguuuaaaaccauaagacuauaugagauuacccagaaagaguaua

SEQ ID NO: 55537 - RNA, 60 nt, Homo sapiens
uauauucuggcuauagcaaaguaguuuaguugugaauauuauuugcauagugagaauaua

SEQ ID NO: 55538 - RNA, 66 nt, Homo sapiens
uaucacagugcuggaguauuccaugugugaaaucauuucauccucccaaugccuagcaaaguggua

SEQ ID NO: 55539 - RNA, 60 nt, Homo sapiens
uaucagagcugucagccuaccuauacagagaaaaaugguacaggcagagacagccuggua

SEQ ID NO: 55540 - RNA, 73 nt, Homo sapiens
uaucaucacuucuguucaaccguguacuggaaguccuagccaguaucacaggcaaaacagaauaagaaagaua

SEQ ID NO: 55541 - RNA, 74 nt, Homo sapiens
uauccaggaauuuauccauuucuucuagauuuucuaguuuauuuguguagagguauguauaguauucuuugaug

SEQ ID NO: 55542 - RNA, 56 nt, Homo sapiens
uaucuguucuuuaaaacuuugauagacgucuaugaaauuguuugcaaggauaggug

SEQ ID NO: 55543 - RNA, 76 nt, Homo sapiens
uaucuuggugaauauuuuauguaagcuugagaagaauguguguucugcuguuguuugaugaaguaaucuauagaua

SEQ ID NO: 55544 - RNA, 77 nt, Homo sapiens
uaucuuuuugauauguuguuggauucacuuagcuaguauuuuguuaaggauuuuagcauauauguucaucaaggaua

SEQ ID NO: 55545 - RNA, 55 nt, Homo sapiens
uaugaaagcuacuucucacaaucacagacuuuuggugugagaaggaucuuauaug

SEQ ID NO: 55546 - RNA, 130 nt, Homo sapiens
uaugaaaugcccacaacuaacaucacacucaauggugaaagacugaaagcuuuucuuuccucuaagauacagaacaaggaaaggaugcucacucuuaucacuguuaaucaacauaguacuggaagucaua

SEQ ID NO: 55547 - RNA, 60 nt, Homo sapiens
uaugacauaguccuuaacccuccuccccacccugggagcaaggaagagauuaugcccaug

SEQ ID NO: 55548 - RNA, 66 nt, Homo sapiens
uaugaugaaagauuuccugagcuagaaauauccuaugauuuucauagcaagagguguugaaucaua

SEQ ID NO: 55549 - RNA, 68 nt, Homo sapiens
uaugauguaggccauggguuucucauaaacggucuuuauuauguugaggaacuuuccuucuauacaua

SEQ ID NO: 55550 - RNA, 75 nt, Homo sapiens
uagaguuaaaccuggguuggagcccugcuucagucauuuacuagcaguguggccuuagacccggccucagcuuug

SEQ ID NO: 55551 - RNA, 72 nt, Homo sapiens
uacuuccaagacauacaacauucuacuacguggacgcuuuccacugaguggcaaugugauguccugaaagua

SEQ ID NO: 55552 - RNA, 69 nt, Homo sapiens
uacuugaaauguuuucccgaccuuggccaaaagcagguugaguuuuccauuggaaaacuuuucuaagua

SEQ ID NO: 55553 - RNA, 63 nt, Homo sapiens
uacuugaucaaugugguacuugaucaaugugauacucgaucaaugugguacuugaucaaugug

SEQ ID NO: 55554 - RNA, 79 nt, Homo sapiens
uacuuugaauacaguaucuucuggcaagcacuggggacugcagucgacaaugcugcugaauauaccugaguacauagua

SEQ ID NO: 55555 - RNA, 66 nt, Homo sapiens
uagaauacuauccaauugccacaagaaaugaacuagauguauauauggcaacauggauggauucug

SEQ ID NO: 55556 - RNA, 91 nt, Homo sapiens
uagaauccuuuguuuaucuuugaccuaugggaguuugacuacuaaaugccuugagguagucuccuuuggguuaaaucugguugguauucua

SEQ ID NO: 55557 - RNA, 66 nt, Homo sapiens
uagaaugccugguguuggccagaaaucucucccauuagagugacuggcaccauccaggugucucua

SEQ ID NO: 55558 - RNA, 109 nt, Homo sapiens
uagaauuagagauacguaagugcuaaagauagugacaugauuugggaucugcuguuuucugggcaaaaacagauccgugucuuguuuuucuuauuuauuuucccuucua

SEQ ID NO: 55559 - RNA, 59 nt, Homo sapiens
uagagacaaagauuugcagauuaggcuagcaaauagaauaaaacuguaacuuuguccug

SEQ ID NO: 55560 - RNA, 56 nt, Homo sapiens
uagagacagugaauuuuuauugcuaggucugucagguggugagaaugacuguucug

SEQ ID NO: 55561 - RNA, 55 nt, Homo sapiens
uagagcucaucuucuuuaaacuucucaugauaguucugaggaaauugagauucug

SEQ ID NO: 55562 - RNA, 80 nt, Homo sapiens
uagcuaggcuaucauauccuagauauaacuucuauuacuauguaagaaguaaagaacggauauuggaaggcaucuagcua

SEQ ID NO: 55563 - RNA, 129 nt, Homo sapiens
uagcuauacugguuuacacauaugagaaacgggagcuguuuagagccugaucaggaauauuugaaauuauuugaaaaaugacuagggcucuaaacagcucccauuucucacguauguaaaccagugcua

SEQ ID NO: 55564 - RNA, 85 nt, Homo sapiens
uagcuaugugacauuggaagauuacuuaguuuucucuuuuguaagaugaaaauaguaauaucuaccuuagaguguuauagaguua

SEQ ID NO: 55565 - RNA, 66 nt, Homo sapiens
uagcuguuaauauacaaaugguggaaaguauuauugccuaucacaguuuugaauauaaugcagcua

SEQ ID NO: 55566 - RNA, 94 nt, Homo sapiens
uagcccaugagagagguuuugcccucgagauaaacuguagcucuaaauuucuuuuaaguuguuagggggaaaaaaucuauuucaguacuugcua

SEQ ID NO: 55567 - RNA, 74 nt, Homo sapiens
uagccucacaaagugcuuaagauuacaggugugagccaccauaccuggccuauuauuacuauuuuuguaggcua

SEQ ID NO: 55568 - RNA, 82 nt, Homo sapiens
uagccuuugguuuaagggaauguuguagcugguuugaucuauccagaccacuguaacuuucucuacauaagcgauaagguug

SEQ ID NO: 55569 - RNA, 58 nt, Homo sapiens
uagcaguaaagaaugugauguugucagaggaaggaagguguugaauuuuuugcuguug

SEQ ID NO: 55570 - RNA, 58 nt, Homo sapiens
uagcaguagacagacuuuggcuacuguguguccauuuccaauuauugaucuacuguug

SEQ ID NO: 55571 - RNA, 55 nt, Homo sapiens
uagcaguauugaaagaugagggagcuacaucuuccuugacaucguugugcugcua

SEQ ID NO: 55572 - RNA, 76 nt, Homo sapiens
uagcauaaauuaauaggauuuaccaggaauaacagaugccucugucauucaggaaauucuaaguauuuaaaggcua

SEQ ID NO: 55573 - RNA, 63 nt, Homo sapiens
uccuacuguaaaguaaagcacaucaaggugaaguauuauauuguugcuuuacauuaucuggga

SEQ ID NO: 55574 - RNA, 73 nt, Homo sapiens
uccuacuuuaugauaucugcaaaucaaguauugccaagcuggacaacauauucacagguaucagagauuagga

SEQ ID NO: 55575 - RNA, 78 nt, Homo sapiens
uccuauuucacagagagaacucaaaccauuggcuagaaacuucuucaaaaucuggucugauuuuucaucuguugggga

SEQ ID NO: 55576 - RNA, 93 nt, Homo sapiens
uccucccaggauuucuuucuugugggugcccuuuuugcagcguaaaaaccccaggggaagagguagcagucacaaaagaaauccuagggagga

SEQ ID NO: 55577 - RNA, 59 nt, Homo sapiens
uccucugaaaucuagauugugaugcaauguauacguucucuaaaucagauuucugagga

SEQ ID NO: 55578 - RNA, 70 nt, Homo sapiens
uccucuugcuauuuguuuucaaugugucauucaguggugggcugaaauguuaaacaaguggcucugaggg

SEQ ID NO: 55579 - RNA, 129 nt, Homo sapiens
uccugaccucaggucaucugcccaccucggccucccaaagugcugggauuacaggugugagucacugcgccuggccaauaauccuagcacuuuggaagaccuaggcaggaggaucacuugaggccagga

SEQ ID NO: 55580 - RNA, 61 nt, Homo sapiens
uccugagaagcauaccagugucuguugaccuagcaacagaguguaggaauguauuccagga

SEQ ID NO: 55581 - RNA, 68 nt, Homo sapiens
uccugagagcagacccucuauaaaucacaggcaccuagaccccuguucucagggucugcguucaugga

SEQ ID NO: 55582 - RNA, 79 nt, Homo sapiens
uccugagguaaaacucaugaaaguguguggaaacuugaaguuuuuaacucucaaucuauuccacuuucauccucuagga

SEQ ID NO: 55583 - RNA, 81 nt, Homo sapiens
uccugugacgggcgagcuuuuggcccggguuauaccugaugcucacguauaagacgagcaaaaagcuuguuggucagagga

SEQ ID NO: 55584 - RNA, 58 nt, Homo sapiens
uccugugagauaauguguaccaggucaaauuuaauuuuggucaguuuucucacuagga

SEQ ID NO: 55585 - RNA, 67 nt, Homo sapiens
uccuggagagucauuuauaguauuuuggaaaacaagucuaaaacacaaauuuguguucucauuagga

SEQ ID NO: 55586 - RNA, 90 nt, Homo sapiens
uccuggucucugaauaggcucuccugcugucucuggucugcccaucccacucaccccugagacuugagggggcuucucugagagccagga

SEQ ID NO: 55587 - RNA, 96 nt, Homo sapiens
ucccagucauacuccugacacaguguuccagcuauuugaaucagacaggcacuucuuuucaucugcaggaaugcugauguccuguguagaauggga

SEQ ID NO: 55588 - RNA, 85 nt, Homo sapiens
ucccaguucuguggauugacuggaccagcugggguaguucucauuuggggucucucaaguggucgcaguuagauagcagcuggga

SEQ ID NO: 55589 - RNA, 59 nt, Homo sapiens
ucccaucgucuccuggaugauaugcaauguccugcagucacagggagauggugacagga

SEQ ID NO: 55590 - RNA, 87 nt, Homo sapiens
ucccuggagauguacgagagcauuaagccaucaucauucacccaugauacauuuaccuauggucuugaucggcucucccaucuugga

SEQ ID NO: 55591 - RNA, 59 nt, Homo sapiens
ucaugaagaucucugccuuguguccaagauucuuggacaaagcagcaguaucuuuauga

SEQ ID NO: 55592 - RNA, 82 nt, Homo sapiens
uccacguuuaugaaguacaguacugaaugaauguauggugcaguaaugaauauacaaaguacaguacaguaaugaaugugga

SEQ ID NO: 55593 - RNA, 69 nt, Homo sapiens
uccagaguuaugguuuccuguguaauaacuagugagauuacuggucacauuggacuaucaaguuuugga

SEQ ID NO: 55594 - RNA, 58 nt, Homo sapiens
uccagggguuaggggccugaagaucuggugucugauguuugcagagcccaacccugga

SEQ ID NO: 55595 - RNA, 59 nt, Homo sapiens
uccagugccagcuguuaaaguuucaucgucucaucgugaaagacacuguccccacugga

SEQ ID NO: 55596 - RNA, 106 nt, Homo sapiens
uccaucuguaaucuuaagagagaacugauuggaugugggcacguuccucagauucuaugcccaacuccaaucaguucucucucucuucccucggauuauagaugga

SEQ ID NO: 55597 - RNA, 90 nt, Homo sapiens
uccauggcaguugucacuuuggcuuuuacugucaugauguugagguucaugagguaguagaaagucaggugaagcacacugucaucugga

SEQ ID NO: 55598 - RNA, 73 nt, Homo sapiens
uccaugugaaaucuaugaggacagcagcaaacacgaaagccaacaugcauuuccuuccuuugauucacuuggg

SEQ ID NO: 55599 - RNA, 58 nt, Homo sapiens
uccauuuuaagagugccauuucacaaaguccauggaagagguaugacuaugaagugga

SEQ ID NO: 55600 - RNA, 88 nt, Homo sapiens
ucagaaucccauguagcuaggauuacagauguccaccuuccaccauacccggcuaauuuuuguauuuuuaguauagaugggguuuuga

SEQ ID NO: 55601 - RNA, 114 nt, Homo sapiens
ucagauggugaugcuauuggcugugauuaugguuaugauucaaguuggcaaugagacucgcaagaugcaauuggcuuguguuuacuguaguuacuguuuuaguucauuuucuga

SEQ ID NO: 55602 - RNA, 62 nt, Homo sapiens
ucagauuugucugugguugucaggcauguuaaugacauacagccauuccagccaaauacugg

SEQ ID NO: 55603 - RNA, 56 nt, Homo sapiens
ucaggcaugcagcaaugcagugacaguaacacaugcagauggaaggcauagccuga

SEQ ID NO: 55604 - RNA, 79 nt, Homo sapiens
ucaggauuucauuaguuuucacuuacagaauuaauuuuaggucacugggaugcuguaugugagaaauaauaaguuuuga

SEQ ID NO: 55605 - RNA, 90 nt, Homo sapiens
ucagcggauaggugcuauuuaaggccaugcuauuagaugaggccacucagagaucuagaaagcaugaccuucagauaacacagucucuga

SEQ ID NO: 55606 - RNA, 81 nt, Homo sapiens
ucaggaggacaauauggagacugaucccucuuuccucuccucugaggaggucgaggaagcucucagcucucuuuccccuga

SEQ ID NO: 55607 - RNA, 68 nt, Homo sapiens
ucacgggaaaauuauugccaucauaaucuugucucauaugguuacucaaggcaauacuuucuuguugg

SEQ ID NO: 55608 - RNA, 55 nt, Homo sapiens
ucacucagaccuggugauaugccaaagagaaagaggcaucacacauuucugaugg

SEQ ID NO: 55609 - RNA, 81 nt, Homo sapiens
ucacucauucauucccugagcaucuguugagcccuugcuuugugcugggcuuugagcuaguugcuggggguacaaugguga

SEQ ID NO: 55610 - RNA, 129 nt, Homo sapiens
ucacugugggaccuuagaccagacacuucaccucucugagcuucaguuuccccucuguaaagggagggcaaaauugcaguuaggaugaugguuuaucuguagccugguuucuucccuugcacacugugg

SEQ ID NO: 55611 - RNA, 55 nt, Homo sapiens
ucacugugggcuuugaauccuguaaguaauuuaaaggcucaaaugcucccaguga

SEQ ID NO: 55612 - RNA, 58 nt, Homo sapiens
ucacugugugucucuguaucugaaucucuuuucccuggucuuacaaagacaccaguga

SEQ ID NO: 55613 - RNA, 71 nt, Homo sapiens
ucacuucuucugugauucuucaguuacuucaggccaucuggauguauacaugcaggucacaggggauauga

SEQ ID NO: 55614 - RNA, 76 nt, Homo sapiens
ucacuugaacccaggagguggagguugcaguaaguagagauugugccacugcacuccaccuugggcaacagaguga

SEQ ID NO: 55615 - RNA, 77 nt, Homo sapiens
ucacuugaaccucggagguggagauugcagugagccaagauagugccauugcacuccagcccuggcaacaagaguga

SEQ ID NO: 55616 - RNA, 76 nt, Homo sapiens
ucacuugaaccugggaggcagagguugcagugagccgagauugcacuguugcacuccagccuaggugacagaguga

SEQ ID NO: 55617 - RNA, 75 nt, Homo sapiens
ucacuugaaccuuggaggcagagauugcagugagccgagaucgugccauugcacucugcauuccagucuagguga

SEQ ID NO: 55618 - RNA, 69 nt, Homo sapiens
ucacuugaacucgagaggcagagguugcagugagccgacauagcaccacugcacucucagcuuggguga

SEQ ID NO: 55619 - RNA, 76 nt, Homo sapiens
ucacuugaagccaggaggcagaguuugcagugagcccagauggugccacugcacuccagccuuggcaacagaguga

SEQ ID NO: 55620 - RNA, 68 nt, Homo sapiens
ucacuugagcugaggaguuugagacugcagugagcuaugaucacaccacuguauuccagccugaguga

SEQ ID NO: 55621 - RNA, 92 nt, Homo sapiens
ucacuuguuaaaaugagcuaagugacuuguuaaagguugugugaccuuguuaaagaucacuuaacagucacuuagcucauuuuaauaaguga

SEQ ID NO: 55622 - RNA, 59 nt, Homo sapiens
ucagaacugauacuagaacuuuagauaguucuagugcuuguucuaguaucuaguucugg

SEQ ID NO: 55623 - RNA, 64 nt, Homo sapiens
ucagaagauuggcacuuauuagcacccugagcuaccuaaaagaauaagugcuugagacuucuga

SEQ ID NO: 55624 - RNA, 58 nt, Homo sapiens
ucauggcauuguuaaggguuuuaaaugagauaauacaaguucuuagcauaaugccuga

SEQ ID NO: 55625 - RNA, 74 nt, Homo sapiens
ucauguagugugauuuucacuagaaggucaauguaauaccaccuucaagucugcgugaaagaugcauugcauga

SEQ ID NO: 55626 - RNA, 58 nt, Homo sapiens
ucauguguugcacugaggaccugccaccuuaugugguguuuuugccaaaaaugcauga

SEQ ID NO: 55627 - RNA, 62 nt, Homo sapiens
ucaucucugauacugagaccuuggguuaggacuauucugaaaggguuucggauuagcaaugg

SEQ ID NO: 55628 - RNA, 69 nt, Homo sapiens
ucaucucuugccagucagaauggugauuauuaaaaaguccagaaacuauagaugcuggcgaggcugugg

SEQ ID NO: 55629 - RNA, 108 nt, Homo sapiens
ucaucugagaacuuguuagaaauacacauuccugggccucaccccgaucuacugaaucagaaacugguggggcccagcaaucugcgauuuaacaagucuucuggauga

SEQ ID NO: 55630 - RNA, 97 nt, Homo sapiens
ucauucaagagauuuauugaacaugccauauguaccagcuauugugcuaggugcuggugauauaacauguauaauaaagaaacaaauuuugugauga

SEQ ID NO: 55631 - RNA, 62 nt, Homo sapiens
ucauuccucuuaaagguaucauugaagcuaugggaaugagugagaucacuaagagguaaugg

SEQ ID NO: 55632 - RNA, 60 nt, Homo sapiens
ucauuuauugcucaugcauuuaauuucuuaucuaagaaaauggugccaugaccaauguga

SEQ ID NO: 55633 - RNA, 74 nt, Homo sapiens
uccaaaacuuagccgcuuaagacaacuucuacuauuucacuucugugguucaagaauuaaaguggcuuuuuggg

SEQ ID NO: 55634 - RNA, 82 nt, Homo sapiens
uccaaaauuaauuguccaaguucaucucucaaaaugaaauaauuucagcuagaaaugagcuguggcacaguaagccuuugga

SEQ ID NO: 55635 - RNA, 59 nt, Homo sapiens
uccaaggucuuuguuuggucuguaucagggcuacacaagccucauacaacaagcuugga

SEQ ID NO: 55636 - RNA, 66 nt, Homo sapiens
ucaucacuucuacucaacauuguacuggagguccuaaccagugcaauaaggauguagaacugauga

SEQ ID NO: 55637 - RNA, 66 nt, Homo sapiens
ucaucaguucuacauccuuauugcacugguuaggaccuccaguacaauguugaguagaagugauga

SEQ ID NO: 55638 - RNA, 98 nt, Homo sapiens
ucauaccuauaauaauuggcaauguuaauugaguauuuacuaugugccaaguucuguacuaagugcuugacuuugauguuuuauuuauuuauuuauga

SEQ ID NO: 55639 - RNA, 56 nt, Homo sapiens
ucauaggauaugaagguggaaauuuaaguaggaaaauuugccuauuauuccuaugg

SEQ ID NO: 55640 - RNA, 61 nt, Homo sapiens
ucauaggucugagaagaaaauaacuugaccaaauuuggcuuucuuuuuauuaggcuuguga

SEQ ID NO: 55641 - RNA, 62 nt, Homo sapiens
ucauagucuaagguucuuuugcauaugagaaaauacagucucuaagagaaucauagacuuga

SEQ ID NO: 55642 - RNA, 89 nt, Homo sapiens
ucauauaacucuguuuuuuucaugcauuuaauaauuguucuugcugcugugucuuuaucuucuuguaugaaaaggaauagauugaauga

SEQ ID NO: 55643 - RNA, 77 nt, Homo sapiens
ucaucaaaugucaaagguaggcaguaucacuugggaaguccaagucacagccuuuuacuuuagagaugaaaagaugg

SEQ ID NO: 55644 - RNA, 62 nt, Homo sapiens
ucaguuugccaguauuuuauggaggauuuucguauugauguucaucaguuauauuggccuga

SEQ ID NO: 55645 - RNA, 55 nt, Homo sapiens
ucaguuuuuaagaguuaugcgacuugaauagugauuugcaaauucuaaaaacuga

SEQ ID NO: 55646 - RNA, 80 nt, Homo sapiens
ucagguuuuauguucaguacuuaugggcauguuuuuauguuuccccaaaauaugucuggaguuacugagcugaagccuga

SEQ ID NO: 55647 - RNA, 62 nt, Homo sapiens
ucagucuacagcacugagcugugugcagggcuccuaugcacccugucagucuguagcacuga

SEQ ID NO: 55648 - RNA, 86 nt, Homo sapiens
ucagguaguucuuuauagcagugugaaaacagacuaauauagaaaauugguauugggaguggggcacugcuauaaagauaaccuga

SEQ ID NO: 55649 - RNA, 86 nt, Homo sapiens
ucagguauuuauuuauagcaaugcaagaauggcuuaauacagaaaauugguacugaggaguggggcauuacuauuaagauaccuga

SEQ ID NO: 55650 - RNA, 66 nt, Homo sapiens
ucgcacaucaaaugcuggcagagugccuggugcuuaguaggugcuuagugaguguuuguugaguga

SEQ ID NO: 55651 - RNA, 67 nt, Homo sapiens
uccguaaguaguauaagguuuuuugacagaaauuacuaucagaaauuaugccuacuacagugaugga

SEQ ID NO: 55652 - RNA, 77 nt, Homo sapiens
ucgcuugaacccaggaggcagagguugcagugagccaagaucgcgccauugcacucuagccucggcaacaagagcga

SEQ ID NO: 55653 - RNA, 77 nt, Homo sapiens
ucgcuugaacccgggagcuggagguugcagugagccaagauugugcuauugcacuccagccuuggcaacaagaguga

SEQ ID NO: 55654 - RNA, 83 nt, Homo sapiens
ucguauggucaugucauguuuaacuucuugaggaacuucuauguugucuuccauagcaguugaaccauuucauccauauacga

SEQ ID NO: 55655 - RNA, 60 nt, Homo sapiens
ucuaauauguauuuuaacguguaagggcuuggauacaacuacccuagaauacauaguaga

SEQ ID NO: 55656 - RNA, 91 nt, Homo sapiens
ucuaccuauugugguuuuuaaaguaccugugguccaggggcaguggcucacaccuguaaucccaggacuuugggaggccaaggugggcgga

SEQ ID NO: 55657 - RNA, 129 nt, Homo sapiens
ucuacuauuggcuccauacuaauguuccuugugauuuaaugcgucucugaguuuugcaugucuaagguuauuuacagcuuaaaagaugcauuuauauuaugauuagucaccggugagcuaugaaguaga

SEQ ID NO: 55658 - RNA, 58 nt, Homo sapiens
ucuacucuaccuucugccucuauggauuugccuauuugagguaccucauguaagugga

SEQ ID NO: 55659 - RNA, 61 nt, Homo sapiens
ucuagccauuaaucuugcauccaucucaaauccaguaugagaugcaagauuagauggggga

SEQ ID NO: 55660 - RNA, 83 nt, Homo sapiens
ucuauuugugaaaauucaucaaaugguuuguauauaugaaaaaaaugaaauauaccugcaggauguaauauuuugcaaguaga

SEQ ID NO: 55661 - RNA, 87 nt, Homo sapiens
ucucaaacaguaacacucuaaagggaugcacgaucuuuucuuuuauacaacagacagugcuuccaucuagagggucacugccugaga

SEQ ID NO: 55662 - RNA, 90 nt, Homo sapiens
ucucaaaccguaacccucugaaaggaagcacuuucuuuucuuucagacaacagaaagugcuucuuuccucgagaaggucacagccugaga

SEQ ID NO: 55663 - RNA, 87 nt, Homo sapiens
ucucaagcugugagucuacaaagggaagcccuuucuguugucuaaaagaaaagaaagugcuucucuuugguggguuacgguuugaga

SEQ ID NO: 55664 - RNA, 57 nt, Homo sapiens
ucucacagaguugaauguuucuuugauugagcaguuuugaaacacucuuuguguaga

SEQ ID NO: 55665 - RNA, 65 nt, Homo sapiens
ucucaugagauuaauaugacugccagggcccaguccuauguggaggaugggugucauucucgaga

SEQ ID NO: 55666 - RNA, 85 nt, Homo sapiens
ucucaugaugugaccaucuggagguaagaagcacuuuguguuuugugaaagaaagugcuuccuuucagaggguuacucuuugaga

SEQ ID NO: 55667 - RNA, 87 nt, Homo sapiens
ucucaugcugugacucucuggagggaagcacuuucuguugucugaaagaaaacaaagcgcuucucuuuagaguguuacgguuugaga

SEQ ID NO: 55668 - RNA, 100 nt, Homo sapiens
ucuaccccuucuagugauuauguggaaauaaaagaaagguuauucuguuuuaaaguaaaauuuuaucauuauauccaucagguucgcuagacaaauuaga

SEQ ID NO: 55669 - RNA, 116 nt, Homo sapiens
ucucccuauuuuguuccaaaauuggucauacaccuucugauauaugagaaguacacccagucccuggucuagagguagguguaugaacuaguucuggugaaugaacgugugggaga

SEQ ID NO: 55670 - RNA, 55 nt, Homo sapiens
ucuccuacacaucaguaagucaaagauaagcaacuuugacacuguuggugggagg

SEQ ID NO: 55671 - RNA, 76 nt, Homo sapiens
ucuccugcauuugugaaugucauaagcuccacccugaguuuuagcccuuggauucucuggcguucaucaauggaga

SEQ ID NO: 55672 - RNA, 87 nt, Homo sapiens
ucuccugcugugacccucaagauggaagcaguuucuguugucugaaaggaaagaaagugcuuccuuuuugaggguuacuguuugaga

SEQ ID NO: 55673 - RNA, 65 nt, Homo sapiens
ucucugaggaagaggcuguaauuugcaugcuuaaucucaugucuauuccacuuuuccuucaggga

SEQ ID NO: 55674 - RNA, 63 nt, Homo sapiens
ucucugugguuuuccagaaauuuauuacugacauuauaaggcuuucugggggagcauggcagg

SEQ ID NO: 55675 - RNA, 70 nt, Homo sapiens
ucucuuuaguugucuccucaaggguacuagucacucaguagaguaccauuugguugggcagccaaagaga

SEQ ID NO: 55676 - RNA, 66 nt, Homo sapiens
ucucuuucccaguucacagaaaugcucugagcaccaugcuaccauugcaguggaguggggaagagg

SEQ ID NO: 55677 - RNA, 59 nt, Homo sapiens
ucugaaacucaugauucuagccaagucugaaggcaaccaaaagagcacugaguuuuaga

SEQ ID NO: 55678 - RNA, 59 nt, Homo sapiens
ucugaaagagcauuugaaugggugcggcaguccacaccuguaauaucagcacuuugaga

SEQ ID NO: 55679 - RNA, 63 nt, Homo sapiens
ucugauccaaucugugggcugucaguuuacaauuucugcuguauagcacuucacuugguuaga

SEQ ID NO: 55680 - RNA, 73 nt, Homo sapiens
ucugaugagaauguguuaaaauggagacucucaucauugcuugugagaguauaaauugaugcagccucucaga

SEQ ID NO: 55681 - RNA, 56 nt, Homo sapiens
ucugauuaagguaaccuggccuugguccaccacuuuacuaaguccccuugauuaga

SEQ ID NO: 55682 - RNA, 66 nt, Homo sapiens
ugaauucuguuagaagguaguucagcacacccucauuuauggacugaaaugccuuuaaugaauuua

SEQ ID NO: 55683 - RNA, 72 nt, Homo sapiens
ugaauuuggaauguaacuugaaacuuuuaucacacauuuugucaaaaguuuauacuacauuuuggggauuca

SEQ ID NO: 55684 - RNA, 64 nt, Homo sapiens
ugacccaguuauucaacuuccucaguuaacagcaaagaggcaugagaggugaauggcaggcuca

SEQ ID NO: 55685 - RNA, 85 nt, Homo sapiens
ugacuacuuaagugaauuucacuacugagugacaaagaggaaaaaaggccauuuauagaauaugaaguuuagacuuaguagcuca

SEQ ID NO: 55686 - RNA, 55 nt, Homo sapiens
ugacuagagcaauuggaaacaauuguuaaaaauuguuuuuaaaauguccugguua

SEQ ID NO: 55687 - RNA, 85 nt, Homo sapiens
ugacuccggaguauaaaugagagaauuucugauagguuuguaaugcauaauuacauugucauauucucucucuuuuugguaguca

SEQ ID NO: 55688 - RNA, 76 nt, Homo sapiens
ugagaaacuuuuacuagaaccuuauucagagugauuucucuuucucugagauugguucuguguuaguccauuuuca

SEQ ID NO: 55689 - RNA, 65 nt, Homo sapiens
ugauauugaggaaugugauuucaaauacuucacagugauguauuaauuauuucacucgacuguca

SEQ ID NO: 55690 - RNA, 80 nt, Homo sapiens
ugaucaaacccuugcugaggauuuggccauugacaugggcuucugguuaaucaggccguuuccuaagaagagucagguca

SEQ ID NO: 55691 - RNA, 58 nt, Homo sapiens
ugagcggcuuucaaaucuggcaucagguaauaacuuguuugccaagaaagucagcuua

SEQ ID NO: 55692 - RNA, 58 nt, Homo sapiens
ugagcugagaucgcgccauugcauucuagccugggugacagugugauacuuagucuca

SEQ ID NO: 55693 - RNA, 58 nt, Homo sapiens
ugaugcuuggcuuccaaucccagacacugauuuuguaugagaugugaccagggcauca

SEQ ID NO: 55694 - RNA, 58 nt, Homo sapiens
ugauggaagaagccaaguuuccugaguggccacuaggaaaacucugucuucuuuauca

SEQ ID NO: 55695 - RNA, 68 nt, Homo sapiens
ugauaucuuuuguauggugagcugcacauuuaauaaagaagcagcugccacuacugaacgauuaauca

SEQ ID NO: 55696 - RNA, 58 nt, Homo sapiens
ugaugagauaaaccaucucuuaagugcagaaauauuugaugaugguuuccuuuccuca

SEQ ID NO: 55697 - RNA, 107 nt, Homo sapiens
ugaugauuaaaaaaaaguguuggcuucauaguuuugcuguaaaacuuacuuugggcaauacagauaaagugcuuacagggaacaugaugcguugcaaacacucauca

SEQ ID NO: 55698 - RNA, 78 nt, Homo sapiens
ugauccuacugugugaaucaauugaucuaugugucugaucuuucacagaaccauacugucuugauuauuguaguauua

SEQ ID NO: 55699 - RNA, 98 nt, Homo sapiens
ugauccucuguccauaguaaguuacgcauguagugacaaaugcaugccacaaggucuugagauuguaucugcaauguguugcugcuggcuguugauca

SEQ ID NO: 55700 - RNA, 61 nt, Homo sapiens
ugaucucagcucacugguugaaacgauucuucugccucagccucccaaguagcugggauua

SEQ ID NO: 55701 - RNA, 55 nt, Homo sapiens
ugaucucagcucagugcaaccucugccucccggguucaagugauagcugggauua

SEQ ID NO: 55702 - RNA, 59 nt, Homo sapiens
ugaucucaggugauucacccacuuuggccucccaaagugcugggaucacacugaaauca

SEQ ID NO: 55703 - RNA, 94 nt, Homo sapiens
ugagaaucgcuugaauuuggcaggcaaaguuuacagugagccgagauggcaccauugcacuccagccugcacgacacagcgagacaccaucuca

SEQ ID NO: 55704 - RNA, 62 nt, Homo sapiens
ugagaaugaugauuuccaauuucauccaugucccuacaaaggacaugaagucaucacuuuua

SEQ ID NO: 55705 - RNA, 102 nt, Homo sapiens
ugagacagaguuuuguucuuauugcccaggcuggagugcaauggcgccaucucggcucauugcaaucucugccucccggguucaagcaauucuccugucuca

SEQ ID NO: 55706 - RNA, 64 nt, Homo sapiens
ugagacauauuauacugcuuuuaucuuuacuuuugaaaggcaaugcagucauggaaugcucuca

SEQ ID NO: 55707 - RNA, 57 nt, Homo sapiens
ugagacgaagucuugcucuguugccaagcuggagugcaguggcacgauuucggcuca

SEQ ID NO: 55708 - RNA, 58 nt, Homo sapiens
ugagacggagucucgcucugucacccagacuggagugcaguggcgcgaucuccgcuca

SEQ ID NO: 55709 - RNA, 58 nt, Homo sapiens
ugagacggagucucgcucugucgcccaggccggagugcaguggcgcgaucuccgcuca

SEQ ID NO: 55710 - RNA, 58 nt, Homo sapiens
ugagacggagucuugcucugucacccaggcuggagugugguggcaagaucuccgcuca

SEQ ID NO: 55711 - RNA, 58 nt, Homo sapiens
ugagacugagucucacucugucacccaggcuggagugcaguggugcgaucucagcuca

SEQ ID NO: 55712 - RNA, 57 nt, Homo sapiens
ugagacugagucuugcucugucacccagguggagugcaauggcaugaucucagcuca

SEQ ID NO: 55713 - RNA, 59 nt, Homo sapiens
ugagacugagucuugcucugucgcccaaagcugaagugcaauggcaagaucucggcuca

SEQ ID NO: 55714 - RNA, 59 nt, Homo sapiens
ugagacugaguuuugcucuuguugcccaggcuggagugcaacgucacaaucucagcuca

SEQ ID NO: 55715 - RNA, 58 nt, Homo sapiens
ugagauaggaucuugcucuguuguccaugcuggaguacaguggugugaucauaucuca

SEQ ID NO: 55716 - RNA, 64 nt, Homo sapiens
ugagaucaaggugggcccugggggccgcccccgccaugcccugcagugcucaccuugggucuca

SEQ ID NO: 55717 - RNA, 64 nt, Homo sapiens
ugagaugaacuugauuguuuuaggacuaaauguuuuuauucaauugacaauuagagaucacuca

SEQ ID NO: 55718 - RNA, 74 nt, Homo sapiens
ugagaugaagugauguaaaacauggggcuacuguuuucucuccaucuccccucgccuugccucgccucaccuca

SEQ ID NO: 55719 - RNA, 57 nt, Homo sapiens
ugagaugaguugcgcucugucgcccaggcuggagugcaguggcgcgaucucggcuca

SEQ ID NO: 55720 - RNA, 101 nt, Homo sapiens
ugagauggagucucacucuguugccgaggcuggagugcaguggcgugaucuccacucauugcaacuucugccucccagguucaagugauucuccugccuca

SEQ ID NO: 55721 - RNA, 102 nt, Homo sapiens
ugagauggagucucgcucuugucacccaggcuggagugcuguggcgcgauuccggcucauugcaaucucugccucccggguucaagugauucuccugccuca

SEQ ID NO: 55722 - RNA, 55 nt, Homo sapiens
ugagauggagucuugucgccuaggcuggaguguggagcacaguggcgccaucucg

SEQ ID NO: 55723 - RNA, 101 nt, Homo sapiens
ugagauggaguuuuacuuuguugccuaggcuggagugcaguggcgcgaucucggcucacugcaaccucuaccucccagguucaagugauucuccugucuca

SEQ ID NO: 55724 - RNA, 55 nt, Homo sapiens
ugagauggguaauuaaauggugaauguauucacauguuuucaauugcugaucuca

SEQ ID NO: 55725 - RNA, 65 nt, Homo sapiens
ugagauuauauuucuuaacagaaauuuacuuaacugugaggaugcuguguggcaaguauuucuca

SEQ ID NO: 55726 - RNA, 58 nt, Homo sapiens
ugagauucuggguggauauaaauuuggggggaacucuauuaaaucuagugcagacuca

SEQ ID NO: 55727 - RNA, 65 nt, Homo sapiens
ugagauuugggaggggccaggggcagaauuauaugguuaggcuuuguguccccacccaaaucuca

SEQ ID NO: 55728 - RNA, 64 nt, Homo sapiens
ugagcacauuuacaucaguucccugugucccccaagucugaugauggugauauggaugugcuca

SEQ ID NO: 55729 - RNA, 72 nt, Homo sapiens
ugagcaggcaauggauauaaaagagauaagaacagaugaaccaaucucaguguuaucuaucugccuucuaca

SEQ ID NO: 55730 - RNA, 76 nt, Homo sapiens
ugagcauaagugcuucagaagacaauauuuuccaaaaaaguuucaaggugaauauuucuaauguggcaucuguuca

SEQ ID NO: 55731 - RNA, 62 nt, Homo sapiens
ugaggaacuagcuacccuaauaggaaggacuugucuugcaacuaggucuggcuggcuuuuca

SEQ ID NO: 55732 - RNA, 65 nt, Homo sapiens
ugaggaggcagucugucccuuagcagagcucaggcacugugcuaggagauccacugcucucuuca

SEQ ID NO: 55733 - RNA, 87 nt, Homo sapiens
ugaggauauuaauuuuguauugcuugaggaaaugguaauguccuccccugaggcaguugcccugcaagacaguacugaugcucuuca

SEQ ID NO: 55734 - RNA, 65 nt, Homo sapiens
ugaggaugcagucugucucuuagcagagcuacagcgcugugcuaggagaucugcugcucucuuca

SEQ ID NO: 55735 - RNA, 102 nt, Homo sapiens
ugaggcaagagaauugcuugaacccgggagguggaggcugcagugagccaagaucacgcuguugcacuccagccugggcaacaagagcaaaacuccgucuca

SEQ ID NO: 55736 - RNA, 101 nt, Homo sapiens
ugaggcacgagaaucgcuugaaccugggacguggagguugcagugagcugagaucaugccauugcacuccagucugggcaacagagugagacucagucuca

SEQ ID NO: 55737 - RNA, 102 nt, Homo sapiens
ugaggcaggagaaucacuugaaccugugaggcagagguuguagugagccaagauugugccauugcacuccagccuaggcaacaagagugaaauucugucuca

SEQ ID NO: 55738 - RNA, 94 nt, Homo sapiens
ugaggcaggagaaucacuugaauccagaagguggagguugcagugagccaagccauugcacaccagucugggcaaagagugaaacucugucuca

SEQ ID NO: 55739 - RNA, 101 nt, Homo sapiens
ugaggcaggagaauugcuugaaacugggaggcagagguugcagugagccaggaucuagccauugcacuccagccuggccaacagagcgagacucugucuca

SEQ ID NO: 55740 - RNA, 105 nt, Homo sapiens
ugaggcaggagaauugcuugaacccgggaggcugagguugcaguugcagugagccaagacugugccacugcacuucagccugggugacagagcaagacugucuca

SEQ ID NO: 55741 - RNA, 130 nt, Homo sapiens
ugaggguugucaaggacacucaggcaggauuugacccaaaagagaugaagguccugacuguacuccaguauggcugcagcauaaucagauuuuccucucucucugucacugucucagaaagcagccuuca

SEQ ID NO: 55742 - RNA, 92 nt, Homo sapiens
ugaggucuuuuuuucauggaauauagucauuuuuauaacauggcagucuuucccugcauuuaaaaugauuuuguucuggaaaugagagcuua

SEQ ID NO: 55743 - RNA, 59 nt, Homo sapiens
ugagucagaauuuugcucuuguugcccaggcuggagugcaauggcacaaucucugcuca

SEQ ID NO: 55744 - RNA, 91 nt, Homo sapiens
ugagucuucucauucuagacacuagauaugugacugauugagugaggaagacaaucacucacaugccuagugucuaggauaagaagauuca

SEQ ID NO: 55745 - RNA, 65 nt, Homo sapiens
ugaguguauguagugaccagggccagagguacuggacuucugaaacuuggacuuuauacgauuua

SEQ ID NO: 55746 - RNA, 84 nt, Homo sapiens
ugaguguauguguguguguacacuuagggguguguaugugaauccaugucugagugucccagugugcauacaggugugugcuca

SEQ ID NO: 55747 - RNA, 64 nt, Homo sapiens
ugaguguuuuuaucaugaaaggguauuagauuuuaucgcauccuucuguuuauggagaugcuca

SEQ ID NO: 55748 - RNA, 56 nt, Homo sapiens
ugaguuagguugucaaugucuuaaggaaugugauccuugaauuccaaccugauuca

SEQ ID NO: 55749 - RNA, 129 nt, Homo sapiens
ugaguugaaauaaucaauaguguuaagaugucuauuuucugcaggaaggaaauagacaguauuaauaacgaagucaauuuccuguaggaaggaaauagacaucuuaacacuauugauucuuucaauuaa

SEQ ID NO: 55750 - RNA, 72 nt, Homo sapiens
ugaguuggaauguauugcuacuucuucgaaucuuggaagaguuuguguagaauugguauuauuucuuccuua

SEQ ID NO: 55751 - RNA, 84 nt, Homo sapiens
ugaguuuggaaaauuaucaucugaagauugcuguucaacuuuuggagagugauauucagaugcuuugaagacuuccaauauuca

SEQ ID NO: 55752 - RNA, 58 nt, Homo sapiens
ugauagugcuuauccaggagaacugacaggacaguuuugagugugauaaacacuguca

SEQ ID NO: 55753 - RNA, 77 nt, Homo sapiens
ucuucagcagugguuuuaaguagagcauacuaaagcaauaguagugugcaggauuuugaugccaucuccgcugaagg

SEQ ID NO: 55754 - RNA, 55 nt, Homo sapiens
ucuucaugucuucaaugggggggguaacauauaccuucugagguugcuaugaagg

SEQ ID NO: 55755 - RNA, 106 nt, Homo sapiens
ucuuccucaugggguccccuuuuuucuuagcaacauucagcucagguacagaugagaauuauguucaucuagggugaguguggccagaaggcagggcaggggaggg

SEQ ID NO: 55756 - RNA, 129 nt, Homo sapiens
ucuuccucuuucucuuccucccccuccucuucuuccuucuucuuagugguauagacuugaaauuguuuaaagcaugacgagaagaagcuuuuggagagagaggcugaagaaucggggagcagaggaagg

SEQ ID NO: 55757 - RNA, 59 nt, Homo sapiens
ucuucuacagugacugcagccauagcauugaugcugguggaugcugugcugugugagga

SEQ ID NO: 55758 - RNA, 113 nt, Homo sapiens
ucuggguauccagcucuuuacugaucuacauggcacagaguagaugcucaauaauauuuuguuacauauuuguucuguccagagaaggggauuagcaaagugggcacagcaga

SEQ ID NO: 55759 - RNA, 76 nt, Homo sapiens
ucuguaaccuagcagacacuuccagagaguucuccagcaaauuuucugccagugugaugcuaacaguggaagcaga

SEQ ID NO: 55760 - RNA, 62 nt, Homo sapiens
ucugugaaucugggaacacaauuaagcuacuaauauuuguuaauuguccuugauuacacaga

SEQ ID NO: 55761 - RNA, 64 nt, Homo sapiens
ucuguguaaaacaauuagaggauuuuuuaaaaucuuaaaagucuucacuguguauuacaauaga

SEQ ID NO: 55762 - RNA, 74 nt, Homo sapiens
ucuguuuaaacgaaauugcucagaagcccuauauguaaaauagguauaaauggagcagcuuugguugaagcaga

SEQ ID NO: 55763 - RNA, 78 nt, Homo sapiens
ucuguuugaaucacaguuauuagagcagccacaggcagggccacgagcggaggcugcucaacugugaugacagccgga

SEQ ID NO: 55764 - RNA, 120 nt, Homo sapiens
ucuguuuucaaucuuucaaaagacaugugaaaaaugaaguuggccugagguuugaggcagauguuuugacugauuugugcucaucucagucaacuguuuucucaagggguugggagcaga

SEQ ID NO: 55765 - RNA, 80 nt, Homo sapiens
ucuuaaucucuguuucuguuauaauaggaagacugcagcuuuguuuacuuucugaggagaauagagaacagggagaaaga

SEQ ID NO: 55766 - RNA, 100 nt, Homo sapiens
ucuggcucaaguuucuaauauccuuuuaaauguaaaugagaaauauauauacauuauuccauugaacaugaaggaaugugugccauggauuuggcccaga

SEQ ID NO: 55767 - RNA, 55 nt, Homo sapiens
ucuccagguagauaugucaggaaucauuugaaauacuuauaugucugcuggggga

SEQ ID NO: 55768 - RNA, 92 nt, Homo sapiens
ucugcuacacaugcaggcucccugcccucugaagcacuuuuuagauacaaaggcaggugaccaccuguauguaccccaaagacuguggcaga

SEQ ID NO: 55769 - RNA, 70 nt, Homo sapiens
ucuggacaaccaagaacagagggaaagaggcagagcacucuuuggagaaaaguucuugggcuuguccaga

SEQ ID NO: 55770 - RNA, 86 nt, Homo sapiens
ucuggccauuuaaagccauugucaaguuuguacuggggccaagcgguguugcagaagaagauaaggcauuuagguuuuaggucggg

SEQ ID NO: 55771 - RNA, 60 nt, Homo sapiens
ucugccacugacaccucaaggaccauuggaucuccugggucauagggcucaaguggcaga

SEQ ID NO: 55772 - RNA, 86 nt, Homo sapiens
ucugccucucaaagugcugggauuuuaggcaugagccacugaacccggccaagucucaaaaacucagauaguuuacccaaaguaga

SEQ ID NO: 55773 - RNA, 67 nt, Homo sapiens
ucugccuuagcagcaauuaucaaucucauuaaccuauagacauguuuguuggauaguuguuggcaga

SEQ ID NO: 55774 - RNA, 66 nt, Homo sapiens
ucucgagaguuccagugacuguugcaaaugccuuuaacucuucagcucacugugaacuucuugagg

SEQ ID NO: 55775 - RNA, 70 nt, Homo sapiens
ugaaccauaugaaauugccguuuuugugggucagaaugauggccuaauauuggugguuuuaugugguuua

SEQ ID NO: 55776 - RNA, 88 nt, Homo sapiens
ugaaaagcuucugaauaaagguguuguucaacacaauucuagaaugcuggaccuuuuaugaacagcacguuuauucagaagccucuca

SEQ ID NO: 55777 - RNA, 55 nt, Homo sapiens
ugaaacacacauugcccuuuaucugagaguucugaaagggcagaggugugucuca

SEQ ID NO: 55778 - RNA, 59 nt, Homo sapiens
ugaaacacaccuccucuccauccuuagugaccccuucauggugaugucgguguguuuua

SEQ ID NO: 55779 - RNA, 63 nt, Homo sapiens
ugaaacauacacucugauggggaagcgaagcgcagagaugcucaucuaguguaugugaauuca

SEQ ID NO: 55780 - RNA, 60 nt, Homo sapiens
ugaaauuauucuuaccaaggugauauccaggaucucugcccuuguucaggaauaguuuca

SEQ ID NO: 55781 - RNA, 89 nt, Homo sapiens
ugaacugaggucacugguagaugcuuaagguguacauaugugugugugacucaguacaguuuucaguguucacugaacacuucaguuua

SEQ ID NO: 55782 - RNA, 79 nt, Homo sapiens
ugaacuguaucuuaaaggcuucggaucagaagguaaaacauuuuacuuuaauauaugugaaguucugagacucaacuca

SEQ ID NO: 55783 - RNA, 90 nt, Homo sapiens
ugaagaacuaggugccuggaauguuccuaaagauucacuugggaaacagcuuaauauaguggacuuuggcaacagaccaacuaggcuuca

SEQ ID NO: 55784 - RNA, 61 nt, Homo sapiens
ugaagacauuuuuggguguguagucuuccccaucucacucaacacucuucauaugucuuca

SEQ ID NO: 55785 - RNA, 72 nt, Homo sapiens
ugaagggcaaacacugugugauuauuucaauugaugcugagaaagcauuugaaauaauucaacaucccuuca

SEQ ID NO: 55786 - RNA, 86 nt, Homo sapiens
ugaauauuauuuggcuguauggauguacuauguuuccuuuauucuuuugcaaguaaauauccgguagucccagcaccauuuauuca

SEQ ID NO: 55787 - RNA, 77 nt, Homo sapiens
ugaaucauacaguaguccucacuugugcaaacccuccucauucaguucauacaagcuaaguugcugcuugugauuua

SEQ ID NO: 55788 - RNA, 130 nt, Homo sapiens
ugaaugaauaagauacuaggaaaaugaugaaguacugugauacuguacugaaguacccauuuaguacagcgauacuaaaguacuaaaguaaguauagugauacagaugaaaucagauaucauuucagaaa

SEQ ID NO: 55789 - RNA, 56 nt, Homo sapiens
ugaaugcuucaugucugggcuguaagaucuacugugagcccuacaugaugcauuca

SEQ ID NO: 55790 - RNA, 56 nt, Homo sapiens
ugaauguaagaugucugcuggucaucaguuacauaaucagcaaauauaaacauuca

SEQ ID NO: 55791 - RNA, 78 nt, Homo sapiens
ucuuucaucuuugcugauugucaucaauauuauuaccaaucuugguaguacuuuaggugagaguaaugagauugaaga

SEQ ID NO: 55792 - RNA, 74 nt, Homo sapiens
ucuuuccccacagugguuuucaacuccaccugcauguuggaaucaucuagggagcuugaaaccaaggggaaggg

SEQ ID NO: 55793 - RNA, 69 nt, Homo sapiens
ucuuucuagcagugcaagaacagacuacuacagaaaauugguaccaggagugguguauugcuaaaaaga

SEQ ID NO: 55794 - RNA, 83 nt, Homo sapiens
ucuuucuaguugucuuuuaaagcuaaaauauguuuauuguaaauugaaaucaugagcagaugaguuuuaguagagcuaaaaga

SEQ ID NO: 55795 - RNA, 62 nt, Homo sapiens
ucuuugcuucugacuuuaaugucuuucaaauuuaugagauacacccagugcagaggcuaaga

SEQ ID NO: 55796 - RNA, 55 nt, Homo sapiens
ucuuuggucuacuuucauauguuauguuuucugaacaugagaguagaaauaagga

SEQ ID NO: 55797 - RNA, 59 nt, Homo sapiens
ucuuugucuuuaaacaucuuguucaguaaaccugcugaauacugugcaaaggauuugga

SEQ ID NO: 55798 - RNA, 90 nt, Homo sapiens
ucuuuuaucugaugagaugacuagaggagggauggccaaauaagguuuaucuggggucccaacucugauugauuggaauuggcugaagga

SEQ ID NO: 55799 - RNA, 60 nt, Homo sapiens
ucuuuucaaguauucaagugauagagaaugugucugucugugaaugaacacuugaaaaga

SEQ ID NO: 55800 - RNA, 68 nt, Homo sapiens
ucuuuucuggaaguagauagauugugucaguggucaacaccucugccaaagucaacuucuaaaauaga

SEQ ID NO: 55801 - RNA, 74 nt, Homo sapiens
ucuuuuggcuuacaguucugguggagagguaagugaaguuuaccaaagcagugaauugucauuaagcuagagga

SEQ ID NO: 55802 - RNA, 75 nt, Homo sapiens
ucuuuuuggagucugauuuuuauguugcucauuuacuuaggaaucgagaauuucuaguucagaacugcaaaaaga

SEQ ID NO: 55803 - RNA, 81 nt, Homo sapiens
ucuugggaaguuugcaguagcucuaaggguucaacaagcaaaauaaaacccugugaauauuuaaacuucagucauccagga

SEQ ID NO: 55804 - RNA, 130 nt, Homo sapiens
ucuugggcaagucucugaagguaucuggccagagcguccuccuuuacaguuggacucacgagggcccuuggcaacuccauaguccucugaguccauguagaagugcuuuggaaagagacagggcugaaga

SEQ ID NO: 55805 - RNA, 74 nt, Homo sapiens
ucuugguaacaauuucugucucagguuguuugugcugcuauaacagaauaccugagacuaggcauuuuauaaga

SEQ ID NO: 55806 - RNA, 67 nt, Homo sapiens
ucuugguuauggaaggcugugguuggccuuguaacaaccugcaauaauugcaccaucuagaucaaga

SEQ ID NO: 55807 - RNA, 70 nt, Homo sapiens
ucuuuaagcagugcaagaauggaauaauaccauaaauugguggcuguagaguggguuacugcuauaaaga

SEQ ID NO: 55808 - RNA, 69 nt, Homo sapiens
ucuuuacagcagugccccacucccauaccaauuuacuguacuggucuguucucacacugcuguuaaaga

SEQ ID NO: 55809 - RNA, 70 nt, Homo sapiens
ucuuuauagcaguguaagaaucgaguaacacagaaaauugguacugaggagugagccauugcuauaaaga

SEQ ID NO: 55810 - RNA, 71 nt, Homo sapiens
ucuuuauagcagugugaaaauguacuaauacagagaauugguauugggauagugggguauugcuguaaaga

SEQ ID NO: 55811 - RNA, 71 nt, Homo sapiens
ucuuuauagcagugugaaaauugacugauauaggaauucuguaccagacgaguggagcacugcuauaaaga

SEQ ID NO: 55812 - RNA, 69 nt, Homo sapiens
ucuuuauagcagugugagaaugaacuaauacagaaaacugguacugggagugaggcacugcuauaaaga

SEQ ID NO: 55813 - RNA, 58 nt, Homo sapiens
ugcaaugggaaaaucagaaggccugggggccccagaccuagauuuuacucagcuugca

SEQ ID NO: 55814 - RNA, 78 nt, Homo sapiens
ugcaccuuuucaauuggcagugcucuugccacaugaaucgcucaucugcccaggauguuuugccaaacauaggugaca

SEQ ID NO: 55815 - RNA, 87 nt, Homo sapiens
ugcacggguguguguacugcaugggugcaugcugcuugggugugugugggcagcauugccuuugcagugagugcagaccucugugua

SEQ ID NO: 55816 - RNA, 99 nt, Homo sapiens
ugcacucauccauccacuuagucacacacucaacuuuucaucuugggugauggagguugggaugcuugugauuuuggugaggauagagauugagaugca

SEQ ID NO: 55817 - RNA, 56 nt, Homo sapiens
ugaugguuuuaaaaagaggaguucccuuguacaacucucucuuuuuccugcucuca

SEQ ID NO: 55818 - RNA, 103 nt, Homo sapiens
ugauguguuuaacucauuuaaugccccuaucaacccuaugagguagguacaauuacuaucuccauuguccagaugaggaaauuggguaaguuaaacaacauua

SEQ ID NO: 55819 - RNA, 81 nt, Homo sapiens
ugauuaugugcgugugugguuuuuuucuccaauaggcaauuauuuccagucagagaaggaaaccagugccuggcauucuca

SEQ ID NO: 55820 - RNA, 63 nt, Homo sapiens
ugauuuaaaguguaugggaggaugugcauagguuauaugcaaaugcuaugccauuuuauauca

SEQ ID NO: 55821 - RNA, 74 nt, Homo sapiens
ugauuugaucuguuuuccuauuguuuguugaugcuuuuauugacagaauuaaugaaaauuacaagguuaaguca

SEQ ID NO: 55822 - RNA, 84 nt, Homo sapiens
ugccaguuugagaagcacagggccugugcuuucaguuuucucacauuugaauauuauguuguauggguuuuguuucuucuggua

SEQ ID NO: 55823 - RNA, 101 nt, Homo sapiens
ugcauguuuuuaaguaaguuggaugucagagguaacaauuuggauugguuaauuucuucaacagugauggccuuuguauuuaauagcuaugacaauaugca

SEQ ID NO: 55824 - RNA, 74 nt, Homo sapiens
ugcagucacagugacaggaugugguucucaucuuggccaagaacaacagcuccauauucugccauugcauugca

SEQ ID NO: 55825 - RNA, 68 nt, Homo sapiens
ugcaguuuaggaacugguaacauugauuucuacucuauuuaccagcguuucuaauuggaaaagcugca

SEQ ID NO: 55826 - RNA, 84 nt, Homo sapiens
ugcauccucaucuucuuuuaguggaauauuuacaguuucuucagcuggacuaucaaaucuuucacuagucaguuguuggaugca

SEQ ID NO: 55827 - RNA, 100 nt, Homo sapiens
ugcagccaagagccuggggagagcuggcugcuguccagcccaccggcuggguccugcaguggacagugaaugccacuccucccucccccuaaucacugug

SEQ ID NO: 55828 - RNA, 68 nt, Homo sapiens
ugcaggcaugacauuucacucuuagauaugccaggauauaccuucuaagaaugugaacauucucugca

SEQ ID NO: 55829 - RNA, 82 nt, Homo sapiens
ugcagaugcccccuggacuguacuccuggccaguguggaccccaaagcuaccucagugacagucaagggccugguuccugca

SEQ ID NO: 55830 - RNA, 76 nt, Homo sapiens
ugcaauuccugaguguagaaacuucuugcacuuauuuaaaauuuaggagagaacauuuaagccacucagguaugca

SEQ ID NO: 55831 - RNA, 70 nt, Homo sapiens
ugcacuuacuuuuaaggggccuugauuuaggagucugguauuaccuaaaugcucuuuaaaagugcuugca

SEQ ID NO: 55832 - RNA, 86 nt, Homo sapiens
ugccacuggguuguguccccaugcaguuggucagagucccuucagagugguggccuuggcaauggcuggggcugaaacaaguggca

SEQ ID NO: 55833 - RNA, 82 nt, Homo sapiens
ugccaucagagacccaguagccagauguagcugcugauuacgaaagacaggaucuacacuggcuacugagccauugagggua

SEQ ID NO: 55834 - RNA, 55 nt, Homo sapiens
ugccaucauaaaaauaugugcuuauuauauguuagguacauaguauuuaguggca

SEQ ID NO: 55835 - RNA, 59 nt, Homo sapiens
ugccuaagcagaaguuugcugcaggggcagggcccucauggagaacaucugcuagggca

SEQ ID NO: 55836 - RNA, 67 nt, Homo sapiens
ugccuccaggaaugacacugauucugcaccuuuggcagugugcacaaucgugcauuccuugucugca

SEQ ID NO: 55837 - RNA, 76 nt, Homo sapiens
ugccuccauagcaggaagaaagcuacucaggagacagcucuuaucacugagacacucuuaucugcauaacaaggca

SEQ ID NO: 55838 - RNA, 62 nt, Homo sapiens
ugccugaaaguuauucaggggcaaguuguuuaauuuccuugcaacuuugugauuuuaaggua

SEQ ID NO: 55839 - RNA, 74 nt, Homo sapiens
ugccugaaucauugcauuaucaagggcaucucuuucuaucaagccauuugcucaaagcagugaaaucuucagca

SEQ ID NO: 55840 - RNA, 64 nt, Homo sapiens
ugccuuuuggucacugccgccgccagcagcccaggcugacugguuugacaguggccauugugca

SEQ ID NO: 55841 - RNA, 66 nt, Homo sapiens
ugcugagauguuuuguuaucaaaggauuguuaauauguggugccugauaauagacauucauaagua

SEQ ID NO: 55842 - RNA, 60 nt, Homo sapiens
ugcugggauuacaggcaugagccacugugccuggcugcauugucccucuuaaucccagca

SEQ ID NO: 55843 - RNA, 58 nt, Homo sapiens
ugcuucaguaguaaauuguuauugaagcuucagucaauagcaaauugcuauuaaggca

SEQ ID NO: 55844 - RNA, 98 nt, Homo sapiens
ugcuuccuuagaacagucuccccauccuuuagacuguccaguugaguuucuagaauuccagcucagggcugaaggcuggggugguuauugagauggca

SEQ ID NO: 55845 - RNA, 70 nt, Homo sapiens
ugcuucuuguucagagaauaaaaauuggugucugaaugcccaguuuugcuucucaugagggacugaagua

SEQ ID NO: 55846 - RNA, 85 nt, Homo sapiens
ugcuuguagagauauaauuuuguuuugugguguaauucaggcugcauuccaguagauggcacuuaagagcaagagccuacaggua

SEQ ID NO: 55847 - RNA, 85 nt, Homo sapiens
ugcuuguggagugagagaugaugugguagaaaagaagcugcauucauucauucauuuauucauucauuugcucacuccacaagua

SEQ ID NO: 55848 - RNA, 59 nt, Homo sapiens
ugcuuuucauagaucaugcuuuuggaaaagucuuccuaaagccagcauccuggacagca

SEQ ID NO: 55849 - RNA, 129 nt, Homo sapiens
ugcuuuuguuuuuuuuugagacagaguuuuugcucuuguuguggaggggagugcaguggggcgaucucagcucacugcaaccucugccucccagccugaagugauucuccugccucagccucccaagua

SEQ ID NO: 55850 - RNA, 68 nt, Homo sapiens
uggaaaguacugagguccaccugaaguguuugaucacuaacuuuggguaagccagucauacuguuuca

SEQ ID NO: 55851 - RNA, 74 nt, Homo sapiens
uggaaaguaguucuaaucuaaggacuuuauuuccccuacauuugucccuuuggaaauuuggaauaacuuugcca

SEQ ID NO: 55852 - RNA, 129 nt, Homo sapiens
uggaaaugagcagagcacauuaauaucgaagaaucugugauuuuccaguggcccugaucaugauucuuuuguggucugguuagggguuggauaacagagaaccuuggguuuauucuacugcuaccucca

SEQ ID NO: 55853 - RNA, 90 nt, Homo sapiens
ugcuaugaaacagcaucaagugcuacagagaaaucuuucacgaaagaaagaggcaaucaauguagcaaacuucauuguugucuuauugua

SEQ ID NO: 55854 - RNA, 78 nt, Homo sapiens
ugcuauugugaaugaugucgcaguaaacauacaugugcaugugucuuuauagcagcaugauuuauaguccuuugggua

SEQ ID NO: 55855 - RNA, 55 nt, Homo sapiens
ugcucaguuuaaaacuuuugaguauugaagugaugcucaaacaaaaugcugagua

SEQ ID NO: 55856 - RNA, 90 nt, Homo sapiens
ugcuccacaccuggcucacccuuggcagcuguggaaucugggcugguaacgcaagcugagcacagccugccaagcugagugaguggagua

SEQ ID NO: 55857 - RNA, 67 nt, Homo sapiens
uggauuaagugcuugccagugcugguagagaagccugucaccucccaccacucucagcacuugucca

SEQ ID NO: 55858 - RNA, 69 nt, Homo sapiens
uggauugagaagcuguggcucaggcacagagaaagaugcccaguuccucccauccugcuucucugucca

SEQ ID NO: 55859 - RNA, 60 nt, Homo sapiens
uggauuucuauguugaccagucuagaccuuuugucuauucgauguuuacauagauguuua

SEQ ID NO: 55860 - RNA, 56 nt, Homo sapiens
uggauaguaauaaacauauaggugcagagguaucuuugugguaugauaauugucca

SEQ ID NO: 55861 - RNA, 76 nt, Homo sapiens
uggauauaauagaaugucaguauuggcuaaaaucguccaauguuucaggcucucuggucauucaaauuuuugucca

SEQ ID NO: 55862 - RNA, 85 nt, Homo sapiens
uggaucauauuauugaaaguugucaacaugaaacuguguuuuugaaaucaaaagugguuaaauauuggcaaucacaugugguuca

SEQ ID NO: 55863 - RNA, 58 nt, Homo sapiens
uggaaguggcagaggaagugguauaggaaaauuaaaucacuuugacggccaacuucua

SEQ ID NO: 55864 - RNA, 94 nt, Homo sapiens
uggaaguguauauuuguuuggaaucccagaucucagagucuucagcuaacaccuacugacacugcaacuauucacaggcaauauguacauucua

SEQ ID NO: 55865 - RNA, 65 nt, Homo sapiens
uggaauaagauaguggaagugggauuaaaaaauggaauuuguuccccuuucucuauuuuagcuca

SEQ ID NO: 55866 - RNA, 61 nt, Homo sapiens
uggaaucaugugcucuguggcauuuugugacuagcuuccuucacugagcaucaugguuuca

SEQ ID NO: 55867 - RNA, 67 nt, Homo sapiens
uggaauugaacuagaaccugcaaauuucaaugggaacaaaagguuaguaggauugguuuaccaucca

SEQ ID NO: 55868 - RNA, 70 nt, Homo sapiens
uggacagcaucccauucacagucacccuucuccauggaguggccauuggaaggugcacugugacagucca

SEQ ID NO: 55869 - RNA, 58 nt, Homo sapiens
uggacugagauuucagcugccacccauggcagguggcacagcuugcaauuuaagucua

SEQ ID NO: 55870 - RNA, 57 nt, Homo sapiens
uggacuguaauagagaacagaaagaugagucagaucagucuguggcuacugcagcca

SEQ ID NO: 55871 - RNA, 72 nt, Homo sapiens
uggagaagugauuugagggugaaaauaggguaagcguauuuacucuuuagcuccuuaaggaaugcuucuuca

SEQ ID NO: 55872 - RNA, 58 nt, Homo sapiens
uggagaugcacgagcagguggagcagcugaagcagagcauccaccgcgugcaccucua

SEQ ID NO: 55873 - RNA, 60 nt, Homo sapiens
uggcaagaccccaucucuacaaaaaacugaaaaauuagcugggagugguggucugugcca

SEQ ID NO: 55874 - RNA, 57 nt, Homo sapiens
uggcaagagauaugugucuauauucauucuucugcauauggauauccuguuuugcca

SEQ ID NO: 55875 - RNA, 55 nt, Homo sapiens
uggcagcagcaaauggcauaucaucuuccgugaucuuggagucaucaugcugcua

SEQ ID NO: 55876 - RNA, 91 nt, Homo sapiens
uggcauagaugaggagcuuaaagcuagcgcugcuuggaaggauuuuuaaaaaucuacagccagucugguuuguagcaucgguuuagggcca

SEQ ID NO: 55877 - RNA, 88 nt, Homo sapiens
uggcaugggguauuuaaugagucucucuggccagagagccuccucaagucucuggccagagacauucauuaaaguuacccagauacca

SEQ ID NO: 55878 - RNA, 79 nt, Homo sapiens
uggccacauuaggacuguguuucaaaagagcacaguggaaaaccacaaagcuucuugagacuuaggcuuuggaugguca

SEQ ID NO: 55879 - RNA, 87 nt, Homo sapiens
uggcaauuaaauauaacacuuuaauccaccuuaagaaucugaaagagauucucuguggaauggaaugauuguguaugaaucaugcca

SEQ ID NO: 55880 - RNA, 58 nt, Homo sapiens
uggccaucugaaaguuccugaugggcauucacccaucaggaaccuuuuugguguguca

SEQ ID NO: 55881 - RNA, 106 nt, Homo sapiens
uggccccugugcacguguggcucucagaggcuccaggucaugauuuccuuguggacaucccuugacguggagucucugggcccacuuaauucucccauaaaggcca

SEQ ID NO: 55882 - RNA, 66 nt, Homo sapiens
uggccucccaaaguguugggauuacaagugugagucaccgugccuggucccaugaacuuuagguca

SEQ ID NO: 55883 - RNA, 64 nt, Homo sapiens
uggccucuuugucucuugaucuuuguugguuuaaagucuguuuuaucagagacuaggauugcca

SEQ ID NO: 55884 - RNA, 78 nt, Homo sapiens
uggcuagaauaaagcaggcagaagaaggaggaaugagcagacuugcugaguucuggccuccauuuuucuccugugcua

SEQ ID NO: 55885 - RNA, 56 nt, Homo sapiens
uggcuagaugagauguacugcacguggcuucugcugcaggcaccuacaucuggcca

SEQ ID NO: 55886 - RNA, 78 nt, Homo sapiens
uggcugaguugucccaguuggguauugaauucaugguaugauuuauuugcaggauugggacuggauaaaacucaguca

SEQ ID NO: 55887 - RNA, 84 nt, Homo sapiens
uggcugcauaaaugucuucuuuugagaagugucuguucauaucuaucacccacuuuuugauggggagaacauuuuugcaaucca

SEQ ID NO: 55888 - RNA, 64 nt, Homo sapiens
uggcugcuguacagguuccauuugaaugcccugauagaggacuauggcaccugacagauagcca

SEQ ID NO: 55889 - RNA, 91 nt, Homo sapiens
uggcugggucaaaugguauuucuaguucuagauccuugaggaaucaccagacugucuuccacaaugguugaacuaguuuauggucccacca

SEQ ID NO: 55890 - RNA, 78 nt, Homo sapiens
uggcuucuaaacaaagagguaauaacaaagcuucucauuguguugcaaauuaagugaggugccuuuuauuagaaguua

SEQ ID NO: 55891 - RNA, 83 nt, Homo sapiens
ugggaacaaagucuguuacagcuauuucuguaggaaacugcuacacuccuuaccagaacggguguaacauuuuguaaguccca

SEQ ID NO: 55892 - RNA, 88 nt, Homo sapiens
ugggaccaccauuguauaugcgguccaucacugaucaaaacguuguuaugcagugcaugacuguauauuaucacaugugaucuuccca

SEQ ID NO: 55893 - RNA, 129 nt, Homo sapiens
ugggacuacaagccugagacacugugcuuagccaacucaccaugucuuuuaaacauucaacuuucaguuaaagggaacacucaagacauguuaugaggcugggcauaguggcucacgccuguaauccca

SEQ ID NO: 55894 - RNA, 61 nt, Homo sapiens
ugggaggaaggugcuaggccuugaguagcaggaagacaaugggucuggcuucuuuguucca

SEQ ID NO: 55895 - RNA, 105 nt, Homo sapiens
ugggaggaugguuugagucugggagguggagguugcagugaugaagugagcugugauugcaccacugcacuucagccuuggcuacagaguaagaccguuaucuca

SEQ ID NO: 55896 - RNA, 84 nt, Homo sapiens
ugggaguacaggggaagaauauuaggggauuucggagugguaaccagacuaagugaaaaacuaauguuuuucucuguacucuca

SEQ ID NO: 55897 - RNA, 63 nt, Homo sapiens
ugggaguugggcagaacaaguggcuugaguguguccuggacuuguuuguccugcccuuucuca

SEQ ID NO: 55898 - RNA, 69 nt, Homo sapiens
ugggauacaagcagagguagggugugcaguuucugagaagugcauugcaucucugcuucaauccuccca

SEQ ID NO: 55899 - RNA, 75 nt, Homo sapiens
ugggauuucuaguucuagacccuugaggaaucaccacacugucuuccacaaugguugaacuaguuuacucuccca

SEQ ID NO: 55900 - RNA, 61 nt, Homo sapiens
ugggcauaauuacagcauuguuuuuggaagauuccauguaauaaagucugaagugugcuua

SEQ ID NO: 55901 - RNA, 57 nt, Homo sapiens
ugggcugagaguaccuuauaaacagggacagugugucuuaaaaagugcucaggccua

SEQ ID NO: 55902 - RNA, 75 nt, Homo sapiens
uggggaagaaaaaacuagguuuguggccaaaaguaaucauauaauaggccugauaagccuuuucuuucugcccca

SEQ ID NO: 55903 - RNA, 76 nt, Homo sapiens
uggggaucuagagcggugcugggggauguuaacugguguucucugguuguaucucacaccccucucauauacccca

SEQ ID NO: 55904 - RNA, 69 nt, Homo sapiens
ugggggcacugaguauguuuagaaguaaaggaagaaguucugaacuguaugaacaauuuauauucccca

SEQ ID NO: 55905 - RNA, 84 nt, Homo sapiens
ugggucaaaugguauuucuaguucuagaucccugaggaaucaccacacugucuuccacaaugguugaacuaguuuacagaccca

SEQ ID NO: 55906 - RNA, 84 nt, Homo sapiens
ugggucaaaugguauuucuaguucuagauccuugaggaaucaccacacugucuuccacaaugguugaacuaguuuacucuccca

SEQ ID NO: 55907 - RNA, 82 nt, Homo sapiens
ugggucaacugguauuucuaguucaagauccuugaggaaucgccacagucuuccacaaugguugaacuaguuuacaguccca

SEQ ID NO: 55908 - RNA, 64 nt, Homo sapiens
uggugagaaaugagaugcuuuuuuucaaagacugagaaaaacccagagacgucuauucucacua

SEQ ID NO: 55909 - RNA, 91 nt, Homo sapiens
ugguggccagaacauuaucacuuugauaguuuaaauggcauugaccaauguauuugaaucagguacaaguuugaagauuuucugguuauua

SEQ ID NO: 55910 - RNA, 72 nt, Homo sapiens
uggucauagguugggcguuugauuuuauggcuuuuaggaagcaaaaaaaaucagcgaccuugcuugagauca

SEQ ID NO: 55911 - RNA, 77 nt, Homo sapiens
uggucuauggccuguaaacuagagacccuggaaagcuggugacauaguuccaguccaaguuugaaggcccaagacca

SEQ ID NO: 55912 - RNA, 62 nt, Homo sapiens
uggguuaagggaauguuguagcugguuugaucuacucaaaccacuaaaacuuucucuuucca

SEQ ID NO: 55913 - RNA, 130 nt, Homo sapiens
uggguuuaaaucccaccucuucuuauaauaucuucaaagugacaaaguugcagcaucuacugcauaggaaccaauaaugauaauguggcaacuuugucauuuuguaaaugaggguacugauacacaccua

SEQ ID NO: 55914 - RNA, 83 nt, Homo sapiens
ugguacuuuuagaagugcuaagaaguggauuuugcaaugacucaugacacuguagcaccucuuuggccuuucguaaaguauca

SEQ ID NO: 55915 - RNA, 62 nt, Homo sapiens
uggguaagugcacaaaucuuaaauguacaucggcgauguauuuuuacaugugcauccaccca

SEQ ID NO: 55916 - RNA, 77 nt, Homo sapiens
ugguauuuguugcagcagcacuaucauuucuuaguaccaaauucugucuuagauaauguugcuauaacaaauuacua

SEQ ID NO: 55917 - RNA, 82 nt, Homo sapiens
ugguuuggugagcaaggguaggggccagagggaaguagaugaauagucuugccacaucccuuucccacccuucacagggcca

SEQ ID NO: 55918 - RNA, 77 nt, Homo sapiens
uguaaacuugccaggcaccaaaguaugcuuuaggauaucaccaugacuagugcccuuugcugccugccaugguuaca

SEQ ID NO: 55919 - RNA, 95 nt, Homo sapiens
uguaaagacauguuuuggauaaaguuugugagaaaaaaauucaagcugcuucuauuuucauacaagcuacaaucacaaagaguuuugccuuugca

SEQ ID NO: 55920 - RNA, 68 nt, Homo sapiens
uguaaagguguuucacuguuguuuuaauuuacaauucccuaauuauauaugguaguagcaccuuuaca

SEQ ID NO: 55921 - RNA, 76 nt, Homo sapiens
uguaaugaucaaaucagaguaauugagaucuucaucaccucaaagcuuuaucuuuacuuugugugggaacauuaca

SEQ ID NO: 55922 - RNA, 63 nt, Homo sapiens
uguacagugucucucaguuugggaucaucugauguuauuuaaugauuagagagaggcugugca

SEQ ID NO: 55923 - RNA, 60 nt, Homo sapiens
uguaccaauuugagagccucaagcaucaccuuuguaugagucuguucucacauugcuaua

SEQ ID NO: 55924 - RNA, 82 nt, Homo sapiens
uguaccacaugcacaucuuuuuagucucacauuugcucaacacagauggacagaaaaaaauagauguauguuuuuggguaca

SEQ ID NO: 55925 - RNA, 72 nt, Homo sapiens
uguacccuaacacccuucagcuuucuuagcucagaggcauuuugagguauggauaucuggagaggaaguaca

SEQ ID NO: 55926 - RNA, 82 nt, Homo sapiens
uguagccuuguaguauaguuugaagucagguagcgugaugccuccagcuuuguucuuuuggcuuagaauugucuuggcuaua

SEQ ID NO: 55927 - RNA, 66 nt, Homo sapiens
uguagcuucuccuuucauucccuguagaaucugucuuguucucauggagucaggagcagaaauaca

SEQ ID NO: 55928 - RNA, 60 nt, Homo sapiens
uguauagccacuauuaaagcugcaauugacuaggaauuuuggcuauuucuguggcauaca

SEQ ID NO: 55929 - RNA, 77 nt, Homo sapiens
ugguggugcacaucuguguuccagcuacucaggaggcugaggcaggaggauggcuggagcccagaaguucaaggcca

SEQ ID NO: 55930 - RNA, 64 nt, Homo sapiens
ugguguauuuagaccuuauauacauuaaauguaauuggugauauguuaggaucuaagucugcca

SEQ ID NO: 55931 - RNA, 60 nt, Homo sapiens
ugguugaaguggaaauugguucaauuuuggaaaacaguuuggcaguaucuacuacagcua

SEQ ID NO: 55932 - RNA, 96 nt, Homo sapiens
uguauccaagauauuuccaaggagaguacauuuuuacuuuuucaggugcuaugauuaaaccucuuaacaguguauuccuuuggacagaggcauaua

SEQ ID NO: 55933 - RNA, 86 nt, Homo sapiens
uguaugauagguuauuauggcauuauuguucuugcuggauauucauggaaguaggaauuuaauguaugauaauacaucaauguaca

SEQ ID NO: 55934 - RNA, 65 nt, Homo sapiens
uguaugcacacguguccaugugcacccauguccaagucaccucucugcacggcugugugugugca

SEQ ID NO: 55935 - RNA, 108 nt, Homo sapiens
uguuggcccuuccuggguccugaguuugcagaccuuuggacuggaacuauaccauuggcucuccugagucuccagccugcugguugcagaucuuaggauuugucagca

SEQ ID NO: 55936 - RNA, 67 nt, Homo sapiens
uguucuaaggaguagaggaauagcaaugaauguuuucauugcuucauuuuuguuauuuuccaggaca

SEQ ID NO: 55937 - RNA, 62 nt, Homo sapiens
uguucucacuuauuugugggagucaaaaauuaaaacaauugaacucauggagaaggagaaua

SEQ ID NO: 55938 - RNA, 55 nt, Homo sapiens
uguucuuacucauaugugggagcuaaagauauuguucucauggagggaaagagca

SEQ ID NO: 55939 - RNA, 117 nt, Homo sapiens
uguucuuuuaagagggacucagcagucaggggagauggcaaugcgaugaugacugagugucuuagucuuuuuuguauugcuaugcaauaucugaggcuggguaauuuauaaagaaca

SEQ ID NO: 55940 - RNA, 74 nt, Homo sapiens
uguggcuaguggaauuaagaaacugaauuuuaaauuguauuuaguuuuaauucauuuaaauuucaauagccacg

SEQ ID NO: 55941 - RNA, 80 nt, Homo sapiens
uguggcugucugacuaggggcccuggcuucuuacuggcucugaacuggaaguggccaucagguccuagcagccacccaca

SEQ ID NO: 55942 - RNA, 89 nt, Homo sapiens
uguggggauggcaugaccuuguccucagugucauccagaaaggaugagggggacaggugucauagcaggaguauuaguucauucucaca

SEQ ID NO: 55943 - RNA, 86 nt, Homo sapiens
uguggguacaaaacagguguauuuucuguagagaauuuugaaacaauaauaaagaugacugaaagguauacgcuuguuauccuaca

SEQ ID NO: 55944 - RNA, 71 nt, Homo sapiens
uguggguggagggaaggacuggacuaaggcaagggggagcaaaguucaguccauuuccuuggucacucgca

SEQ ID NO: 55945 - RNA, 89 nt, Homo sapiens
uguggguuaauugauacacauuuuuauauauuuaaggggagcauaugcuauuuucuuaaaugcauagaauguguagugaucaaguuaca

SEQ ID NO: 55946 - RNA, 71 nt, Homo sapiens
uguggaaucccaagauaauuuguuuguagauggauaccuaguuugcauauucgaguuauuuugggaccaca

SEQ ID NO: 55947 - RNA, 66 nt, Homo sapiens
uguggcaguuuuaaauaugaaaacacccccuguauguauuggguguauuuauauuuaaacucuaua

SEQ ID NO: 55948 - RNA, 90 nt, Homo sapiens
uguucagauuuuaaaauaacuucuacagaauauguuugagguauuuucuuaaugaacuuuauuuuguagagaaguuuuagguucccagca

SEQ ID NO: 55949 - RNA, 58 nt, Homo sapiens
ugugucugggcaggguaauuuugaaugacaucauucaaagugcauguucccacuugca

SEQ ID NO: 55950 - RNA, 62 nt, Homo sapiens
uguguguauuugagauauugugaaauauauauuugguuuucaucaauacuucuuggcauaca

SEQ ID NO: 55951 - RNA, 64 nt, Homo sapiens
uguguguguguggacaggcaggguggggagggauaaacacauuaaaaauguccaaauaaauaca

SEQ ID NO: 55952 - RNA, 73 nt, Homo sapiens
uguguucaaaguaaagccucaggauggauucaaaagggaagagaauugauaagagggauacuuuagaaauaca

SEQ ID NO: 55953 - RNA, 126 nt, Homo sapiens
uguuacaguccccaacauuauucaguagaauacugaauauaguuaacaguauauuacaguacuacuggcuguacuauacuguaacuguauucaguauucugcugaauacuguaggcaauuauaaca

SEQ ID NO: 55954 - RNA, 74 nt, Homo sapiens
uguuacuguacugaauacuguagacaguuguaacacaauuguuacacaaugguaaguguuuguguauugaaaca

SEQ ID NO: 55955 - RNA, 70 nt, Homo sapiens
uguuagaugccauagcagaauuuggucaagucucuuagugcagggauuuggauggaguuguuaugugaca

SEQ ID NO: 55956 - RNA, 90 nt, Homo sapiens
uguuauauuugcaugggcuacauuuuuucauccugucacuuucaaucuacaugugucauugaaucuaaaaugagucucuuguagacagca

SEQ ID NO: 55957 - RNA, 71 nt, Homo sapiens
uguuaucaucagccauacaacguaugcauguaugccugaugcuaacauauguuguaugguugaugguaaca

SEQ ID NO: 55958 - RNA, 68 nt, Homo sapiens
ugugacauuuuuacugaugagaguucuaguaacaguuaacucaaguuuucuccuacagaagagucaca

SEQ ID NO: 55959 - RNA, 66 nt, Homo sapiens
ugugagaugauagauauguuaauuugcuuuaaaguagcaaugauuuuacugucuguguaucucaua

SEQ ID NO: 55960 - RNA, 67 nt, Homo sapiens
ugugaguggaaaacauaugcuuguugaauuaaguaaugaucaauccuaugcucuguuuuuacucaua

SEQ ID NO: 55961 - RNA, 69 nt, Homo sapiens
ugugaugugcauguguaugugcaugugauguuguauguucaucauguguucaucacagcacaauucaca

SEQ ID NO: 55962 - RNA, 65 nt, Homo sapiens
ugugauguguuuuguaguucaacucauuucccuuuaggaccucaguagacacuaaauacauuaca

SEQ ID NO: 55963 - RNA, 60 nt, Homo sapiens
ugugauuaaguuaacaauguugaguggugggauuauucacaugggugcaauauaaucaca

SEQ ID NO: 55964 - RNA, 70 nt, Homo sapiens
ugugauuaaguuaggauuuugagauagagaaauuauccuauauuaucuuggugggcuuaauauaauuaca

SEQ ID NO: 55965 - RNA, 84 nt, Homo sapiens
ugugauuucccggagcaucucauucccauuacuucaaaaauagcacagaacuguucugauggcacagugaguuccagggauaca

SEQ ID NO: 55966 - RNA, 61 nt, Homo sapiens
ugugcaaucagcuucauuacauuuuucagcaccuuuaggaacuguagugggaguugacaca

SEQ ID NO: 55967 - RNA, 66 nt, Homo sapiens
ugugcacaugguagguauugaguaugugaauuauugaacauguacuuuagauaaauuaugugcaca

SEQ ID NO: 55968 - RNA, 60 nt, Homo sapiens
ugugccacugcaccuggccuaaggaaguaguagaauucuuauaaggaaugcagaggcaca

SEQ ID NO: 55969 - RNA, 60 nt, Homo sapiens
ugucuggaguaugaaccauguaucagcaccgaaagguucuagaagucagacuuucgggca

SEQ ID NO: 55970 - RNA, 76 nt, Homo sapiens
ugucuguauaaaaaucacuuugcuacaaggcaguuaguuacuaaucugaccaaccggcuggagugaaggugagaca

SEQ ID NO: 55971 - RNA, 65 nt, Homo sapiens
ugucuuuaacauuggcuacauacagaacuuuguuaaacaugugcacugcagcaauguaaaagaca

SEQ ID NO: 55972 - RNA, 59 nt, Homo sapiens
ugucuuuaagcaaacaguguuuguguaaccaccuuguagcaacauucagcuugaagaua

SEQ ID NO: 55973 - RNA, 116 nt, Homo sapiens
ugucuuuuucuuuauaaauuaccagucucagguaugucuuuaucagaaaugugagaacagacuaauaugagggcauacucagugaggugaagaguuugugcaaaggcagagaggca

SEQ ID NO: 55974 - RNA, 59 nt, Homo sapiens
ugugaacagaauuagucaccuaaucacaggagugacuucgaucccagguucuguucaca

SEQ ID NO: 55975 - RNA, 60 nt, Homo sapiens
ugugaauggugcugcaaugaacauacacaggcaugugucuuuauaacagaaucauuuaua

SEQ ID NO: 55976 - RNA, 58 nt, Homo sapiens
uguccagggauggggucagggacggguuuggcuguugccuagaugcugcccugggaca

SEQ ID NO: 55977 - RNA, 72 nt, Homo sapiens
ugucuaauuuugccuugacacuuacaguccaacaaaaaauuuauaggaaaaauaucacagguaaaguugaca

SEQ ID NO: 55978 - RNA, 68 nt, Homo sapiens
ugucuaucgaaguucacaauguacuuuccauuuuauucuuauguauuauggaacuuaauugauggaca

SEQ ID NO: 55979 - RNA, 57 nt, Homo sapiens
ugucaucccuaaaguugaggugauaauuacaguacuugccuuaacauugggaugaua

SEQ ID NO: 55980 - RNA, 66 nt, Homo sapiens
ugucauugguucuguuuaugugauggaguauguuuauugauuuacauauguugaaccagucuggca

SEQ ID NO: 55981 - RNA, 66 nt, Homo sapiens
uguccuaacaugcacucugugauuuggaauggugaguauugcagcuugcaggguguguaaagggca

SEQ ID NO: 55982 - RNA, 86 nt, Homo sapiens
uguccucuggaguaaugguuggcuauucuacuugauagugguugaacaucaucauuaaucaggcaaugcuugcuacccacagggca

SEQ ID NO: 55983 - RNA, 107 nt, Homo sapiens
uguccuggagccccugcaccugucuccaaaugguauccgcugugccgccaggacgcgcuucacuggcagcaugggugccuuugugaagauugugaggcgcuaggaua

SEQ ID NO: 55984 - RNA, 129 nt, Homo sapiens
uguccugugagccucuaaagcagugguuuucauuccggagugauuuuaacuuccagcaauguccgaagacauuuuuagucgucaaagcauuccgggaagaggagcaugcuacugacaucuaguggguag

SEQ ID NO: 55985 - RNA, 78 nt, Homo sapiens
uguaugugugguuuaagaauugaauucuggaaagauaccggaauugcauaaacacauuucuuaugaccugcguauaca

SEQ ID NO: 55986 - RNA, 56 nt, Homo sapiens
uguauguguuuuauguguguuuaaauaaauauguuagauacacguguauacauaca

SEQ ID NO: 55987 - RNA, 93 nt, Homo sapiens
ugucacuugccucauccaaucugcugacuuuagaacccaaaaaguuucuuugguaugggcuuuuggagcugaauuacaguggagggcaugaug

SEQ ID NO: 55988 - RNA, 79 nt, Homo sapiens
ugucaggcauuguucuagaaacuggaguuacauguugaguagaagagauaaacaccauucucuguaacaagaacugaca

SEQ ID NO: 55989 - RNA, 63 nt, Homo sapiens
ugucaguuucuugagauggaacgcacuccugcugaagaugcugugaccaucuuugagaugaca

SEQ ID NO: 55990 - RNA, 57 nt, Homo sapiens
uucagggacuuuagacaagagaggacacaggauugcuucucccucuggggcccuggg

SEQ ID NO: 55991 - RNA, 99 nt, Homo sapiens
uucaaagcucucuuucagccgggugagguggcuuguuccuguaaucccagcacuuaugggaggccgaggcaggccaucgcuugagcccaggagcuugag

SEQ ID NO: 55992 - RNA, 61 nt, Homo sapiens
uucaaaguguugguuuugggcugggcgcgguugcucaugccuguaaucccagcacuuuggg

SEQ ID NO: 55993 - RNA, 94 nt, Homo sapiens
uucagaaaugauuguuagaauguagaauggaacugacuauagcugacuuggcucagcugaugggaguucuguguuaaaugacaaagauucugga

SEQ ID NO: 55994 - RNA, 58 nt, Homo sapiens
uucagaguagagcgacuucuccugcaaccaaguuuuaagagagguuuucuaugaugag

SEQ ID NO: 55995 - RNA, 57 nt, Homo sapiens
uuauuuauauucaguguggaucucugagcaugguucaagcacauugaguguguguga

SEQ ID NO: 55996 - RNA, 60 nt, Homo sapiens
uuauuuggucuguaauuacauggacuuuauuuggaggucagugaaggaacaacuaaauag

SEQ ID NO: 55997 - RNA, 97 nt, Homo sapiens
uuauuuguuuauuaucuguuggguuauugcuggaucccuagucucuagaacagcacuuguuuucauaguagucacuuaauaaauaauacauggauga

SEQ ID NO: 55998 - RNA, 98 nt, Homo sapiens
uuauuuuacuucagugaaucagagugaugguuuaaguauugcacaagggcacuucaugugaugcaugccacacuuuggauucugcaugggagagauaa

SEQ ID NO: 55999 - RNA, 56 nt, Homo sapiens
uucaagucaacaagcacuugagaguucucauguuuuuuaagagcuugaaauuugga

SEQ ID NO: 56000 - RNA, 57 nt, Homo sapiens
uucaagucaaggaaagaggucugagaagaacaacucugccaucaccuugaucuugga

SEQ ID NO: 56001 - RNA, 68 nt, Homo sapiens
uucaauaacuauguuugaguauccauuagcacagacccuaugugagauacuagagauauaguggugaa

SEQ ID NO: 56002 - RNA, 89 nt, Homo sapiens
uucaauacgugagccucaaagucuucucauuaugucuuccacauauuaaaguggaaguaaccagaaggcuuuggaaauucaggucugaa

SEQ ID NO: 56003 - RNA, 56 nt, Homo sapiens
uucacagugugaucuaugggcaaugugcugcuacaccaccauguuucaccugugaa

SEQ ID NO: 56004 - RNA, 60 nt, Homo sapiens
uucacguucugccaugauuguaaguuuccugaggccuccccagucaugaagaacugugag

SEQ ID NO: 56005 - RNA, 57 nt, Homo sapiens
uuacuguauagaaucaucuugaaugcuaccagugcuacacgggaugcuauaugguga

SEQ ID NO: 56006 - RNA, 80 nt, Homo sapiens
uuacuuaaccucucugagacuugguauuguaaucugugaaaaggaaauaaucacaguguucuugugaggguuaaauguag

SEQ ID NO: 56007 - RNA, 62 nt, Homo sapiens
uuacuugagauggggugucacuauguuggccaggcuggucucgaacuccucaccucaaguga

SEQ ID NO: 56008 - RNA, 67 nt, Homo sapiens
uuagaacaguguuugccucgcucucacucacucucauaaaugcuagugauggucaugcacugucuga

SEQ ID NO: 56009 - RNA, 75 nt, Homo sapiens
uuagaauucaacaguaaagcauuuuuaaguggcuacauggcuauucuaaaguuuuauuuauugugucaauuuuga

SEQ ID NO: 56010 - RNA, 78 nt, Homo sapiens
uuagauaaaugaggauaguguugaaggcaggaggggauucuccuguucugccccagccuugucgugcuucccaucuga

SEQ ID NO: 56011 - RNA, 70 nt, Homo sapiens
uuagauuggugcaaaaguaauugugguuuuggcugaaaaguaaaugcacaaagauuuugcacuaaucuaa

SEQ ID NO: 56012 - RNA, 106 nt, Homo sapiens
uuagauuugacugccuuuuaguuuacaggugaaugcucacauucuaaucagagaagaugauugggauauaaagcauucucagaaaccaggaaguaugcauuucuga

SEQ ID NO: 56013 - RNA, 66 nt, Homo sapiens
uuagcauaagggcaagcucuuuaguguccuucaaagcacauauguaaauagcugccuguguacuaa

SEQ ID NO: 56014 - RNA, 77 nt, Homo sapiens
uuagcuugacuguuuuugguguauaaaaaugcuagugauguuugcacauugauuuuuauaucuuaagacuuugcuga

SEQ ID NO: 56015 - RNA, 57 nt, Homo sapiens
uuaggccuuugauuggggugcucugugcuacagguagugccaaaucgagggcucuga

SEQ ID NO: 56016 - RNA, 93 nt, Homo sapiens
uuaggcggcgaacucuuauuguugccaugcuuucauuugaaccauggagaaauggcaaaucagaggcauggacaaaaucauagagcuacuuga

SEQ ID NO: 56017 - RNA, 58 nt, Homo sapiens
uuaggcuuauauucccaucagaacaucugguacaacugguggaagauaaguagccuga

SEQ ID NO: 56018 - RNA, 56 nt, Homo sapiens
uuagggaguaaucuaaaaaugguccuugggacuuuuucuaugauugauuccucuag

SEQ ID NO: 56019 - RNA, 80 nt, Homo sapiens
uuagguaggugcaaaaguaauagcgguuuuuaccauuauguucaauggcauaaaccaccauuacuuuugcaccaaccuaa

SEQ ID NO: 56020 - RNA, 65 nt, Homo sapiens
uuaggucuuaagucuuuaaugcauuucgagugauuuauuguguauguuguaagacuuagaccuag

SEQ ID NO: 56021 - RNA, 67 nt, Homo sapiens
uuauuagguuagugcaaaaguuauugcaguuuugcuauuaaaaguaacuuuugcaccaacccaauag

SEQ ID NO: 56022 - RNA, 77 nt, Homo sapiens
uuauuagguugguggaaaaguaacugccauaacuuuuaauggcaaaaaccacgaguacuuuugcaccaaccuaauag

SEQ ID NO: 56023 - RNA, 60 nt, Homo sapiens
uuauuagguugguggaaaaguaauugugguuuuugccauuacuuuugcacaaccuaauaa

SEQ ID NO: 56024 - RNA, 129 nt, Homo sapiens
uuauuauauagguaaacuguaucauggagguauggacuacagauuauuucaucagccacauaauaagcaaaauacucgagagguaguuuuuuggucgucucccuccugccacacuccacccucaaguag

SEQ ID NO: 56025 - RNA, 82 nt, Homo sapiens
uuauucagucucggguaugucuuuauagcaguguggaaauguacuaauucaccagcuaaaaagaguauguuuggacuaguag

SEQ ID NO: 56026 - RNA, 62 nt, Homo sapiens
uuauucauuaauugcuaagguuugaaagcaaccaagauguccuucaguggguuaauggauaa

SEQ ID NO: 56027 - RNA, 110 nt, Homo sapiens
uguuuuauggguguauguuucucccugucccugugaccguggagaaaaaagugcuaaauaaucaugggguaaaggcacaggggacacaucaagauaauuuacauagaaca

SEQ ID NO: 56028 - RNA, 75 nt, Homo sapiens
uguuuuuugacuuuuuaacaauagccauucuaacuaguaucuuggaaugguaucuuguugggguuucaauucgca

SEQ ID NO: 56029 - RNA, 87 nt, Homo sapiens
uguuuagugacucuguguguaauaccuuugacuauauguggagaaccaugaaugaaguugguuguuugcucauaaguucacuggaca

SEQ ID NO: 56030 - RNA, 66 nt, Homo sapiens
uguuuauuggaugacuagaaaugucaacuuucauuagcaaagugaauguuugguccuuuauaaaca

SEQ ID NO: 56031 - RNA, 66 nt, Homo sapiens
uguuucuaguucuagauccuugaggaauccccacacuggcuuccacaaugguugaacuaguuuaca

SEQ ID NO: 56032 - RNA, 56 nt, Homo sapiens
uguuucuuacguuuuuagaggcuucgugacggaguuaucagagacauugagaggca

SEQ ID NO: 56033 - RNA, 83 nt, Homo sapiens
uuaaagaaaaccuuguauagguggcaaaacugaaauuuaaaguacugcaauuguuucaguagcauugcuuauacagucuuuaa

SEQ ID NO: 56034 - RNA, 61 nt, Homo sapiens
uuaaagugaucauaaggauagucugucuggugauggacuagcacuucuaugagcauuuuag

SEQ ID NO: 56035 - RNA, 58 nt, Homo sapiens
uuaaaguggugggauuccaggcaugagccaccaagcucagucuucucuacuauuuuaa

SEQ ID NO: 56036 - RNA, 64 nt, Homo sapiens
uuaaccauuaagggucaggaaauugacuuccuccuggacacuggcuuggcuuucuugguguuaa

SEQ ID NO: 56037 - RNA, 67 nt, Homo sapiens
uuaagaaauaaaugguaucggcauuuguguauaguucuuuguaugcaaaugcugcuauuucucuugg

SEQ ID NO: 56038 - RNA, 60 nt, Homo sapiens
uuaaggaaggagucuuaaaugggugccuacuuugugcacuuagacucucuuugucuuuaa

SEQ ID NO: 56039 - RNA, 58 nt, Homo sapiens
uuaaggggaccugugagaguacaggugaaccaagcaucagauucuacaggccuuuuga

SEQ ID NO: 56040 - RNA, 59 nt, Homo sapiens
uuaauauauuaugugguuucccuauccaaugaacuuggauagggcuuguugauaguuaa

SEQ ID NO: 56041 - RNA, 65 nt, Homo sapiens
uuaauguaucuaucacaucacauaguuaccaauuuguauauguguguaugugguaagaacauuaa

SEQ ID NO: 56042 - RNA, 94 nt, Homo sapiens
uuaauuugucugcaugauuggugagcagagggagaaguaaauuugucgcgaaagcuucauucuucuguuuuaacaacucacaaagagaaauuaa

SEQ ID NO: 56043 - RNA, 81 nt, Homo sapiens
uuacaugauuaucucagugaauguggaaaaagcauuggaaaaacuucagcauccacucaguucacugagauaaucauguaa

SEQ ID NO: 56044 - RNA, 60 nt, Homo sapiens
uuacauuuccccauauugagaaccgaauuucucaagucaguuugggagaagcuauuguaa

SEQ ID NO: 56045 - RNA, 68 nt, Homo sapiens
uuagugugcaaguauuaaucaucuagccaauaaugaccaaaucuaguugaaaugcaugugcacauuaa

SEQ ID NO: 56046 - RNA, 57 nt, Homo sapiens
uuauaacuggggaguuccuugaauggaaauauguucacaguggcugcuuaauuguga

SEQ ID NO: 56047 - RNA, 86 nt, Homo sapiens
uuauacagaaucaugcauuaagagaacaugcacauaaggcaaaaugaugacugcauggccuuuaaaugucacagaguacugucuaa

SEQ ID NO: 56048 - RNA, 77 nt, Homo sapiens
uuauacagcugguaaguggcagagauucuggaggcagacugccugcauuugaauucugucgcuuacuagauguauga

SEQ ID NO: 56049 - RNA, 102 nt, Homo sapiens
uuauacuuuaaguuuuaggguacaugugcacaacgugcagguuaguuacauauguauacuugugccauguuggugugcugcacccauuaacuugucguuuaa

SEQ ID NO: 56050 - RNA, 56 nt, Homo sapiens
uuauagcagcauaaauggacuaagacagagucuuaaaucaguuugggcugcuauaa

SEQ ID NO: 56051 - RNA, 62 nt, Homo sapiens
uuaucagcagagucauacuucaaaaauuauaaaguauuuuuguuaggugguuuguugacuga

SEQ ID NO: 56052 - RNA, 67 nt, Homo sapiens
uuaugaagccuguguugaauuauagaaauaaaauuuuaauuauguuuacauuaacauggcuuuguag

SEQ ID NO: 56053 - RNA, 88 nt, Homo sapiens
uuaugauaguuuacugagaaugaugauuuccaauuucauccaugucccuacaaaggaaaugaacucaucauuuuuuauggcugcauag

SEQ ID NO: 56054 - RNA, 99 nt, Homo sapiens
uuaugauauuaugcuugugacuggauguacagucaguauuuguguguaaauuuaaauauauaaauuucauguguaugugcaguuaauauucauucauga

SEQ ID NO: 56055 - RNA, 83 nt, Homo sapiens
uuaugauuuuuaugguuuauuuguaagcagagugcugucccaaaauggaugaaccuguuuaccaguaaaucaguaaacuguaa

SEQ ID NO: 56056 - RNA, 55 nt, Homo sapiens
uuaugcagcaaagugcuugaaacauaaccaaugcuucacuugcacguuugcauag

SEQ ID NO: 56057 - RNA, 62 nt, Homo sapiens
uuauggcaaaugaaagaaagccagucucagaaggcgaugggcugggugauucauuuccauaa

SEQ ID NO: 56058 - RNA, 59 nt, Homo sapiens
uuaugucuuugagcaaugcuguguccccugauagaaaggcacucucuauaaagacauga

SEQ ID NO: 56059 - RNA, 76 nt, Homo sapiens
uuauguuauauuggcagaagagaagaugauagcugugaaaaauguagccuucuuugauuuuguuacuaagacauga

SEQ ID NO: 56060 - RNA, 67 nt, Homo sapiens
uucucuacgugucaaggagaagcuaaaggaagcaauugcuauuaccuuuuuaagacagguuagagga

SEQ ID NO: 56061 - RNA, 71 nt, Homo sapiens
uucucuaugucuuucauauuuuggggauggugcuuuguccugugaccucaauuuucugaaggauguaagaa

SEQ ID NO: 56062 - RNA, 57 nt, Homo sapiens
uucucuguggauugggugagaggcaggagaucagccucagagaaccuaagcggagga

SEQ ID NO: 56063 - RNA, 68 nt, Homo sapiens
uucugcuguuguuuuuguugaagguguuuucugauccaaauaaagugucacaaugaacagcagcagaa

SEQ ID NO: 56064 - RNA, 60 nt, Homo sapiens
uucuggggguauuuugauuuguggacguggagaaagugguagagagcaauaccuccagag

SEQ ID NO: 56065 - RNA, 56 nt, Homo sapiens
uucuccucuuuggacucguugaccuuaguuaaugaugucauagucuaagaugagaa

SEQ ID NO: 56066 - RNA, 68 nt, Homo sapiens
uucuucuuaauguccugggaacuaucugugcagacuaagaauaauuuguuccuuaggcauuggaagaa

SEQ ID NO: 56067 - RNA, 55 nt, Homo sapiens
uucuucuuaggugaugaagaggucauuuuaacuucuacagccaguucaggaagaa

SEQ ID NO: 56068 - RNA, 65 nt, Homo sapiens
uucuuuuaauugugggggagugugaguugcuuacguccuuacucaaaucccucagaauuauagaa

SEQ ID NO: 56069 - RNA, 113 nt, Homo sapiens
uucuuuucuucuugaggucccaaaauaucuugagguuccuggaccugcuagaaagugucauucuuuauuuaucacaggucaggaaucuugcaagggaaccauaagacaaggaa

SEQ ID NO: 56070 - RNA, 97 nt, Homo sapiens
uugaaaauguaagagcauaaaagcuggauuucgcauccuguuaggguauuuuugguccuaucagagaugggaagucagcuaauaauugcauauuuag

SEQ ID NO: 56071 - RNA, 60 nt, Homo sapiens
uugaaagacagaggggcaaguuggauuaaaaagcgagacccaacuguaugcugucuucaa

SEQ ID NO: 56072 - RNA, 62 nt, Homo sapiens
uugaaagcuaucagagauuccauaauguaaugaugagcaaucuggacucugaaagcuaucag

SEQ ID NO: 56073 - RNA, 64 nt, Homo sapiens
uugaaauaucucgucuucuacguuucuuuaagggaagcuuugaaguagaaagacgaaauuuugg

SEQ ID NO: 56074 - RNA, 115 nt, Homo sapiens
uucuggugccuucccuugaagcagucugggguauugcacacagaaucaggguaagggauuuggcuuccccuguguguaagugcgcuaggcccauuguaagcagagagcaguggaa

SEQ ID NO: 56075 - RNA, 83 nt, Homo sapiens
uucugguuucucuggugaugaacaggaccauaaugcuccaaagagcuuaugucuuuuguguucagcuaccagggcagguagag

SEQ ID NO: 56076 - RNA, 108 nt, Homo sapiens
uucuguaaauggugauuggguucccagaccuaucuauaaaagugaauccagcccacaguguauucacuuuuauagacaggucugggaacccgaucaccacguauagaa

SEQ ID NO: 56077 - RNA, 84 nt, Homo sapiens
uucuguaagaugaggaagaguuagcagggaaaaggggaggaaaggcuuggagcccugagaaaacuuuguccuuauguuggggaa

SEQ ID NO: 56078 - RNA, 72 nt, Homo sapiens
uucugucucuauggauuugccuauucuguauuucauauaaauagaagcauaauucagccacaagagauggaa

SEQ ID NO: 56079 - RNA, 84 nt, Homo sapiens
uucuguuuucccucuacauaaauguaugccugucagaugggucaagacguacaauguauauuuuacuguaggcugaagucagag

SEQ ID NO: 56080 - RNA, 67 nt, Homo sapiens
uugaagagaguaguggaucuuccauaacggaguuugagaucugagaauggaaagacugccucuucaa

SEQ ID NO: 56081 - RNA, 67 nt, Homo sapiens
uugaagagguagucugucccuuagcagagcucgaacgcugugcugggagauccacugcucucuucag

SEQ ID NO: 56082 - RNA, 62 nt, Homo sapiens
uugacagaccuuggucauauccucugacucaccaucuucucugugacccucagguuugucaa

SEQ ID NO: 56083 - RNA, 79 nt, Homo sapiens
uugaccaaguaaagacugagaauagaucuugaagaauauggugaaaaucuucauaguucuuuuagucauuauuugucaa

SEQ ID NO: 56084 - RNA, 62 nt, Homo sapiens
uuccaggucuuccugaauggauuccucuccccauuguggaauauuacagagaggaccuggga

SEQ ID NO: 56085 - RNA, 86 nt, Homo sapiens
uuccauuaaagucugaucccuuuuuuaaauagcuguuuggcuaaucuguugugguagacacuguugaaaaggccccacuuucggaa

SEQ ID NO: 56086 - RNA, 59 nt, Homo sapiens
uucuacaggcuguucaagaagcauagcucugacaucagcuucugggaaugccugaagaa

SEQ ID NO: 56087 - RNA, 84 nt, Homo sapiens
uucuagaaggcaaugauggagguagauuguccauaauaaagggugugaugggcccucucuacuuuuaucagagcacagcuggaa

SEQ ID NO: 56088 - RNA, 80 nt, Homo sapiens
uucuagcaccugcgguguuggcguugucaugggaauucugcaggcuuuagacaacugaaacacugugcaacugugcagaa

SEQ ID NO: 56089 - RNA, 66 nt, Homo sapiens
uucuaugcuaugcuauuacucagaaguuaauauugauauuaacaucuagaguuuuggugcuaagaa

SEQ ID NO: 56090 - RNA, 59 nt, Homo sapiens
uucucaauggcaacuuguugcuuggauucucaucagaagcaaauaauugucuuugaggg

SEQ ID NO: 56091 - RNA, 60 nt, Homo sapiens
uucucacggcccugcgcacuggcauuuuccaccuguaaugcguggcaggagccgugggga

SEQ ID NO: 56092 - RNA, 69 nt, Homo sapiens
uucucagauggggccaaguccuucugugaagccaaaaaucuuucauggaggauuugcuucuuuugagga

SEQ ID NO: 56093 - RNA, 84 nt, Homo sapiens
uucucagcuugacuuuucccuuuagcuuagugauuuuggggcacucaaggaacacugcagacagaggggcacguuuugugggaa

SEQ ID NO: 56094 - RNA, 56 nt, Homo sapiens
uucucaggguacagucagaauguagauuaugucucaauucaaguaugccuugagaa

SEQ ID NO: 56095 - RNA, 73 nt, Homo sapiens
uucucagguauagauaaaucugugugauauggauguuuaagaauaaauaucacagcauugucuauaauaagaa

SEQ ID NO: 56096 - RNA, 69 nt, Homo sapiens
uuccgggucuggcacagggaaaguacaagauaagcucuggugcaucuuauugugccacaaaauaaggaa

SEQ ID NO: 56097 - RNA, 68 nt, Homo sapiens
uuccuacaaaguacuguuuaaauugcagaacaauuuccaguuccacuguagcaaaaaguacuuaggaa

SEQ ID NO: 56098 - RNA, 99 nt, Homo sapiens
uuccuauaaggauccuaucacaguugcauauuuaaggacuacgaaaugaacguauuuuaaggcaugaacugugacuaaaugauggggcagggauaggag

SEQ ID NO: 56099 - RNA, 93 nt, Homo sapiens
uuccuauugcuccuuuuguugcuauuuagcaccugugcacaccaggcauuagucggugcauugggagucagugcugaacaaaggggguaggag

SEQ ID NO: 56100 - RNA, 85 nt, Homo sapiens
uuccucaagauugcuuuggcaauucagauucuuuuauaguuccauaugaauugugugaaaaaugccuuuggaguuuugauaggaa

SEQ ID NO: 56101 - RNA, 61 nt, Homo sapiens
uuccuugugacuaguagugaccacguggccagccaauguagcacagccagugaugaaggga

SEQ ID NO: 56102 - RNA, 61 nt, Homo sapiens
uuccuugugcaggguacuugccagcccuuuacaguauggcagcuguguccuucguaaggaa

SEQ ID NO: 56103 - RNA, 81 nt, Homo sapiens
uuccuuuccuauauguguauauccuauuaguucuguccuucuggagaacccuaauauagaauguacagagaagaaaaggaa

SEQ ID NO: 56104 - RNA, 114 nt, Homo sapiens
uuccuuucuuccugccaaacaaauccagugauugugaaaaaccucucguggaagguucaagcauguuucaauaaaugaaggauuuuaauucagugaauuugcagaaacaaggaa

SEQ ID NO: 56105 - RNA, 78 nt, Homo sapiens
uucaguuuccauguaguugagcaguuuugagugaguuccuuaauccugaguucuaguuugauuacacuguggucugag

SEQ ID NO: 56106 - RNA, 64 nt, Homo sapiens
uucaguuugccaguacuuuguuguggauuuucucaucgauguucaucagggauauuggccugaa

SEQ ID NO: 56107 - RNA, 113 nt, Homo sapiens
uucauacagggccuuguguguaguuguagcucauuaauucucagugcagugcaaauauacagcauucacuguugaugggcaugcagguggucgccaguuugggcuauuaugaa

SEQ ID NO: 56108 - RNA, 62 nt, Homo sapiens
uucaucuggcaauucagagauuuauucuuggugcggauuuauuucuggagagcuagugugaa

SEQ ID NO: 56109 - RNA, 83 nt, Homo sapiens
uucauuauucacuccauuucauuuuagcucuugaagucaaaaugggauuccaaagagcaaaauagaaguuuggagaguuugaa

SEQ ID NO: 56110 - RNA, 77 nt, Homo sapiens
uucauuuaauaaaguucugcuggcauauaugauguuucucuaaauugguugcuacuuaggagcuuuauucuaaugga

SEQ ID NO: 56111 - RNA, 128 nt, Homo sapiens
uuccaaaguugcucccacauugucagguuaucuuuauagcaguaccccaguauccugguaccaauuuccuguauuagucuguuuucauacugcuaaaaagaacuaccuaagacuggauaauuaaugaa

SEQ ID NO: 56112 - RNA, 79 nt, Homo sapiens
uuccaacacuauguugguucuguuuauaugcuggauuacauuuauugauuugcacauguugaaccagcaaaaacuggaa

SEQ ID NO: 56113 - RNA, 77 nt, Homo sapiens
guacugcagacauguggauggagguguggggagugaguuagacagcuuugggcccugaccuccauucugagcagugc

SEQ ID NO: 56114 - RNA, 107 nt, Homo sapiens
guagagggauuagaggaauaauucuuuuugucuguuuggugucaugagggggacaggaaguuguucggugucaugagggggacaggaaguuguucagucccauuugc

SEQ ID NO: 56115 - RNA, 92 nt, Homo sapiens
guagagguugaggugauuugucugcaggaauaguggaacuagacagggaaaugauuuauuacucuaaugacaaaugaucaacaaacuucugc

SEQ ID NO: 56116 - RNA, 76 nt, Homo sapiens
guagcaaauacgugauauugcaguauauaggaaagaaugagcacuuucauuauuguaaacaucuguacauugcuac

SEQ ID NO: 56117 - RNA, 61 nt, Homo sapiens
guagcagaaugaguguucaaacccagacuguuuggcuuuggagugugcucauaacugcuac

SEQ ID NO: 56118 - RNA, 56 nt, Homo sapiens
guaucauacuguuuugauuacuguaucccugugguauaguuugaguagugugaugc

SEQ ID NO: 56119 - RNA, 77 nt, Homo sapiens
guauccccucagcuuuuguuugucuaagaaauauuuuguuguuucuucaugcuugaaauaauagcugugcaggguac

SEQ ID NO: 56120 - RNA, 66 nt, Homo sapiens
guauccugagggaggggagggaucaucagaguuggaagagugaugccuuuuuguccucaguuauau

SEQ ID NO: 56121 - RNA, 80 nt, Homo sapiens
guaucuccgagcucccagagaguugcuguagugagugcugaaugucuauggcacuaguacuggaaagcaauguggagugc

SEQ ID NO: 56122 - RNA, 92 nt, Homo sapiens
guaugcaagauggccucagccaucucuuagggauucacuacaguuggauguggaauaaacuagagaggacugagagcccugcuuuggcguau

SEQ ID NO: 56123 - RNA, 76 nt, Homo sapiens
guaguugugaugguuauguaagaagaauccauguuguacucuaagcauuaugucuugcacaaauuauuuuaacugc

SEQ ID NO: 56124 - RNA, 74 nt, Homo sapiens
guaguuuaauuaggucccaugugucaauuuuaauuuuuguugaaauugcuuuugaagacuuagucauaaauuau

SEQ ID NO: 56125 - RNA, 72 nt, Homo sapiens
guauagacaugcacauggcuaacuuuuuucuguauuuuuuguagagacaggguuucgccauguugcucauac

SEQ ID NO: 56126 - RNA, 107 nt, Homo sapiens
guauauaugguauaaagggugauuagacaguguguguauauaugguauaaagggugauuagacuguguguguauauaugguauaaagagugauuagacuguguguau

SEQ ID NO: 56127 - RNA, 58 nt, Homo sapiens
guauauauuauacauuauauagcauguagugauguaugauguaauguaugauauguac

SEQ ID NO: 56128 - RNA, 58 nt, Homo sapiens
guaggauaugaggauuuuaagacagucagcuuauagcuguuuugcucuuuauaccuau

SEQ ID NO: 56129 - RNA, 87 nt, Homo sapiens
guaguaaugguuguauaauauuuugggugugcuuaaugccacugaauuacacacuuaagacacuuaaaauguuacauuuuauucuau

SEQ ID NO: 56130 - RNA, 87 nt, Homo sapiens
guagucaagagaucauaugcaguaaugaacucuauggaagaggauuaaauaugacauucauuugguaaaugauuucuguaugauuau

SEQ ID NO: 56131 - RNA, 64 nt, Homo sapiens
guagugcaguuugagaaucagugggugacagcagauacacagggguuccaaagcuugcaguuac

SEQ ID NO: 56132 - RNA, 111 nt, Homo sapiens
guaguuauguucuaauaaaacuauuuacaagcacaggcagcaggcuggauuucaucugcagguguaguuugcugaccaugguuuagaguauguguucugggauguggcugc

SEQ ID NO: 56133 - RNA, 112 nt, Homo sapiens
gguucguucucuugaaaauugaaagcagaguuuuuaguaauuccuuucugagaugaugaggguuuagauaaggaguaucauauuaaaacuaagcuucaagagaaccaggacc

SEQ ID NO: 56134 - RNA, 71 nt, Homo sapiens
guaaauggauauugccaucuccuuuuaaaauuaugcauuuaggaaagaauaggagaggcaguuuccuuugc

SEQ ID NO: 56135 - RNA, 73 nt, Homo sapiens
guaaauuuucagucuguguguacauuuauagaugaacuauguuuauuguaaucaacacaucauugggaauugc

SEQ ID NO: 56136 - RNA, 73 nt, Homo sapiens
guaaauuuucagucuguguguacguuuauagaugaacuauguuuauuguaaucaacacaucauugggaauugc

SEQ ID NO: 56137 - RNA, 79 nt, Homo sapiens
guaacaaagggagcugcauaaucuuguggucuguucugagcuccaugcacaggauaaugcagcuccugauacugauugc

SEQ ID NO: 56138 - RNA, 58 nt, Homo sapiens
gguuuugagcagagaagugcccugcgcugcagcagcugacagccaggcucugcaaacc

SEQ ID NO: 56139 - RNA, 74 nt, Homo sapiens
gguuuuggagugauaugguuauaugggaugcccauguaaacagggacccuuuaaccauggcacucagcaggacc

SEQ ID NO: 56140 - RNA, 78 nt, Homo sapiens
gguuuggguaagucagauuuacaaugucagccaucaucuggccauguuugaaagucuaggcuuacaguaaugcaagcu

SEQ ID NO: 56141 - RNA, 118 nt, Homo sapiens
gguuuucaaagugagucuuggaccaugauguuaaacuuuuguuuucccugagauuaauagcugucucaauuuagggcuuguuuaacuaucauuaauguccaaacucuccaacaaaacc

SEQ ID NO: 56142 - RNA, 88 nt, Homo sapiens
gguuuuccucauguuucuugucauugcaguaagagugggcucuugaaguuucccaagggucuuacuuuccuguagucaugggaaggcu

SEQ ID NO: 56143 - RNA, 126 nt, Homo sapiens
guaaacaagcuguugucauacuugaguccuugaguauugaauuugagcugucucuuagugacaauaccaaguagauaguuggauauucaaaucuggggcuuaggcagaggccagggcuauguauau

SEQ ID NO: 56144 - RNA, 58 nt, Homo sapiens
guaaacugaucugaaggccaggcucuccugggaugcuugcaaaucagaucaaguuuac

SEQ ID NO: 56145 - RNA, 64 nt, Homo sapiens
guaaguaaguaagagguauuacaugcugucauagcagaauauaccucuuacuuucagcacuuac

SEQ ID NO: 56146 - RNA, 61 nt, Homo sapiens
guaagugauagaucugggauucagaaccaggucuccuuuccccaggauucuguuacauuac

SEQ ID NO: 56147 - RNA, 55 nt, Homo sapiens
guaauaacuguggaaaaagguuuuugcagucgcuuaucugugccacuguuauuac

SEQ ID NO: 56148 - RNA, 67 nt, Homo sapiens
guaauaauuugcuaccuggugggauauugugagguugagugaaucaucagugcuugcaaauuauuau

SEQ ID NO: 56149 - RNA, 64 nt, Homo sapiens
guaaucucaccuacuugggaggcugaggcgggagaaucgcuugaacccaggagguggagauugc

SEQ ID NO: 56150 - RNA, 64 nt, Homo sapiens
guaaucucagcuacucaggaggcucaggcaggaaaaucacuugaaccugagagguggagguugc

SEQ ID NO: 56151 - RNA, 64 nt, Homo sapiens
guaaucucagcuacucaggaggcugaggcacuagacucgcuugaaccugggaggcggagguugc

SEQ ID NO: 56152 - RNA, 58 nt, Homo sapiens
guaaucucagcuacucgggagacaggagaaucgcuugaaccugggagguagagguugc

SEQ ID NO: 56153 - RNA, 64 nt, Homo sapiens
guaaucucagcuacucgggaggcugaggcaggagaauugcuugaaccugggaggcagagguugc

SEQ ID NO: 56154 - RNA, 64 nt, Homo sapiens
guaaucucagcuacuugggagccugaggcaggagaauugcuugaacccgggagguggagguuac

SEQ ID NO: 56155 - RNA, 64 nt, Homo sapiens
guaaucucagcuacuugggaggcugaggcacaggaaucucaugaacccaggagguggagguugc

SEQ ID NO: 56156 - RNA, 64 nt, Homo sapiens
guaaucucagcuacuugggaggcugaggcaggagaacugcuugaauccaggaggcagagguugc

SEQ ID NO: 56157 - RNA, 64 nt, Homo sapiens
guaaucucagcuacuugggaggcugaggcaggagaaucgccugaacccaggaggcggagguugc

SEQ ID NO: 56158 - RNA, 64 nt, Homo sapiens
guaaucucagcuacuugggagguugaggcaggagaaucccuugaacccaggaggcagagguugc

SEQ ID NO: 56159 - RNA, 62 nt, Homo sapiens
guaaucucagcuacuugggagguugaggcaggagaaucuagaacccaggaggcggagguugc

SEQ ID NO: 56160 - RNA, 64 nt, Homo sapiens
guaaucucagcuacuugggagucagaggcaggagaaucacuagaacccaggaggcagagguugc

SEQ ID NO: 56161 - RNA, 64 nt, Homo sapiens
guaaucucagcuucuugggaggaugaggcaugagaauugcuugaacccaagagguggagguugc

SEQ ID NO: 56162 - RNA, 68 nt, Homo sapiens
guagggguaaauucuggacuuugccauugcauuuguaaaugucauggcacugaugagaguuuccuuac

SEQ ID NO: 56163 - RNA, 63 nt, Homo sapiens
guauguggaguguaugugacagagaggaauaagauguuaucucuguccucugcuuuccauagc

SEQ ID NO: 56164 - RNA, 64 nt, Homo sapiens
guauuaguuuucuguggauuacaagcaagucacacauuuugaauguacucaaggaaaacuaugc

SEQ ID NO: 56165 - RNA, 65 nt, Homo sapiens
guauugcacauggcaggugcucaauuauuacugaaugaauaaggaagccuggauuauugcaauau

SEQ ID NO: 56166 - RNA, 130 nt, Homo sapiens
guauugcuuuagcuauuuauggucuucuguuguucuauacaaaauuuaggauuuuuuccauuucuguggagaauguaauugguauuuugauagagauuacauggaaucuguagauugcuuuggguaguac

SEQ ID NO: 56167 - RNA, 116 nt, Homo sapiens
guauuguauccaacaugcuuguguauguaugucuauuauguagcaggaagguuuuccccgaacaucuauucugcuaucaugcuggaccagguaaacaagcucuuuauaugcaauau

SEQ ID NO: 56168 - RNA, 70 nt, Homo sapiens
guauuucuaguucuagauccuugaggaaucaccacacugucuuccacaaugguugaacuagcuuuuaugc

SEQ ID NO: 56169 - RNA, 66 nt, Homo sapiens
guauuucuaguucuagauccuugaggaaucaccacacugucuuccacaaugguugaacuaguuuac

SEQ ID NO: 56170 - RNA, 81 nt, Homo sapiens
gucacaguucacacuuugcgcuguauucccuuguuagacucaagaucucaacagugggcacuguaaauguggaauggugac

SEQ ID NO: 56171 - RNA, 66 nt, Homo sapiens
gucacauuccuauuuucaucuuccuugguguuucuagcacuggaaguaaccaugaauggaauugac

SEQ ID NO: 56172 - RNA, 86 nt, Homo sapiens
gucacuacauuuuauuuugaugcuagauggauguguaggaauaucuuaucauugccucaaucuguauuuuucugaaauguagugau

SEQ ID NO: 56173 - RNA, 68 nt, Homo sapiens
gucauuauaucauugccauggaaagggguggugacucuccgguguugccauggcaaugguaaacugac

SEQ ID NO: 56174 - RNA, 71 nt, Homo sapiens
gucauuaugcuccaucuugucaguaaucuucuuguuaaagagcacucguugacaugaugagcaauaauggc

SEQ ID NO: 56175 - RNA, 62 nt, Homo sapiens
gucauuguauuuaacucgaaagggauuguagaaggcacaucucauuccuugaaaauaaugac

SEQ ID NO: 56176 - RNA, 85 nt, Homo sapiens
gucagguugcgcacugcaugaggauacucagucaaugggccaaguguucgcugagaugcuccucuugcaaagccuuuugcuuggc

SEQ ID NO: 56177 - RNA, 105 nt, Homo sapiens
gucauaguuguaaccaaacugaauaacaugcuuuguuuaugacuuucuuugagcauuuguagcagagcauauucauucggggagggaauauuuuacaauaaggac

SEQ ID NO: 56178 - RNA, 58 nt, Homo sapiens
gucacuggcugucuuguaugauuuaacugacaguucuuuauccaugcaguacagugac

SEQ ID NO: 56179 - RNA, 62 nt, Homo sapiens
gucacugucuacuguaauagccccauuuaaaaaauguugaugugccuuagagagacggugac

SEQ ID NO: 56180 - RNA, 84 nt, Homo sapiens
gucagacauuuuauuagcaccaugguagaauaaugguagauaacagucuuccauuauuaguacugugguggaauaacagucccc

SEQ ID NO: 56181 - RNA, 79 nt, Homo sapiens
gucagaugguggauuauuucgauuccugauuaaaaucuuuacagcuccucaauaucuauggaauagucuacacucugac

SEQ ID NO: 56182 - RNA, 76 nt, Homo sapiens
guccucugauagaucugggcaaaguaaaucaaaaacuuucuggaaaagauuuaccauuuuagaugcuauuaaggac

SEQ ID NO: 56183 - RNA, 120 nt, Homo sapiens
guccugagcagcggcugaaugggcucuaccugugacucaccguuccucuccugguaggcagcaacaauaugggugaggucguagucauaggcaaaggggcuggucccguugaucacggau

SEQ ID NO: 56184 - RNA, 80 nt, Homo sapiens
guccuugagauuaucuugaucuugaaaguugcuggccuuugagcaacuucuucaaacccucaagaugcauccccauggac

SEQ ID NO: 56185 - RNA, 82 nt, Homo sapiens
guccuugcuauugugaauggugccgcaauaaacauacgagugcaugugucuuuauagcagcaugauuuauaaucguuugggc

SEQ ID NO: 56186 - RNA, 72 nt, Homo sapiens
guccaugauuuucugcacuauggaaguauuauuuaacaaauuuguguccacaguggauuaaaguuacuggac

SEQ ID NO: 56187 - RNA, 72 nt, Homo sapiens
guccaugggaaauaguuauugagauuaauauuauuauuaugcuauugauuaauugugauuaggcagguggac

SEQ ID NO: 56188 - RNA, 80 nt, Homo sapiens
guccauuuuacugaugagaaaacuaaggcacaaagaaauuaaggaacuugccugagaucauacuguuaguaaguaaggac

SEQ ID NO: 56189 - RNA, 76 nt, Homo sapiens
gucccauuccaucuugcauuugcuaaaaugcauuuggaaucacauuauuauagauuaugcaagauuggaagacggc

SEQ ID NO: 56190 - RNA, 69 nt, Homo sapiens
gucccuuaagcuauagugaauaaauugcacaauaaaugagcaaggaucuauaaacauagcuccaggggc

SEQ ID NO: 56191 - RNA, 57 nt, Homo sapiens
guccuaccuggaggaacucaggacugcagggacagcugagaagaaacagguaaggac

SEQ ID NO: 56192 - RNA, 59 nt, Homo sapiens
guccucagugugcuuauuucggcuugcuccaugguuugcgguagcauagacugcaggac

SEQ ID NO: 56193 - RNA, 66 nt, Homo sapiens
ggucuuacaguaugaguaagaguucucugaacagacagagggaacuugaauguacuggcuaggacc

SEQ ID NO: 56194 - RNA, 113 nt, Homo sapiens
ggucuucucacucugucacacccugguuggagugcagcuugugcgaucagcagugagccaugauugcacaucugcacuacagccugggugugacagugugacacacaaagauc

SEQ ID NO: 56195 - RNA, 73 nt, Homo sapiens
ggucucugcucgucuaauauugguguguaggaaugcuugcaauuuuugcacauugauuuuguauccugagacu

SEQ ID NO: 56196 - RNA, 76 nt, Homo sapiens
ggucugcagcaaccucaauucuugcuuccucaggagaaaaaauucaacugaaggacauaaggcagagugagagacc

SEQ ID NO: 56197 - RNA, 60 nt, Homo sapiens
ggucuaaugaggagaaaaaaggaaagagaucaauucagaucuccuucauuccuuuggacc

SEQ ID NO: 56198 - RNA, 75 nt, Homo sapiens
ggucguguuauugaaggacauucuaugguagaugagucccucaucacagguauguucuuucaaaggaucaugacc

SEQ ID NO: 56199 - RNA, 55 nt, Homo sapiens
gguccagaggcuucauuaagacuuucgacugaauguggagugaagguucuggacc

SEQ ID NO: 56200 - RNA, 79 nt, Homo sapiens
gguccuaauggaggacaaugucaccuucagauggugugugcaucucuggaggacguguccaccaugaaagauuuggacu

SEQ ID NO: 56201 - RNA, 69 nt, Homo sapiens
ggugagaacagauggcuuuauuaugccgaauuguccaauucaucaacaugguaugccucuguauuuauu

SEQ ID NO: 56202 - RNA, 59 nt, Homo sapiens
ggugacagagugagguccugucucaaaaaaggagggagagagucaucucuaucuguacc

SEQ ID NO: 56203 - RNA, 64 nt, Homo sapiens
ggucuuuguugucuuucguauggaacacuacaaguugguccuuuccauuggagacacucagacc

SEQ ID NO: 56204 - RNA, 69 nt, Homo sapiens
ggugaaaagaugagcaccauacacagcagccuggccauuggucauguguauggugcuaaucuuuucacc

SEQ ID NO: 56205 - RNA, 67 nt, Homo sapiens
ggugaggguugagcuggaauucacacccacaucugggaggugcaaauuccagcucaacuccugcacc

SEQ ID NO: 56206 - RNA, 55 nt, Homo sapiens
ggugccaggagagggcaggagggcuacagccuuucaccugcuguucuuuugcacc

SEQ ID NO: 56207 - RNA, 71 nt, Homo sapiens
ggugauggauauaucuauuacauugaccauggugacaguuucacaaguguauagacauguccaaucucauc

SEQ ID NO: 56208 - RNA, 61 nt, Homo sapiens
ggugaugguuaccacaaauuauaagauaggaaaccucucuuuuggguauggagccaucauu

SEQ ID NO: 56209 - RNA, 57 nt, Homo sapiens
gguucugcaggaaacagaacaaggauuaauuauugaugucugucuccgaguagaauu

SEQ ID NO: 56210 - RNA, 104 nt, Homo sapiens
gguuaggacauauaguauuauuugauagacacauauccaugugaaaaaucaguugacacgugagagggcgaugugucuauuucauaugucuagguuugucaacc

SEQ ID NO: 56211 - RNA, 82 nt, Homo sapiens
gguuaucaagcagugcauaggaucuaaaauuugauuuccuuaaguucaaauucuggaucuaugacuuauuagcuggguggcc

SEQ ID NO: 56212 - RNA, 72 nt, Homo sapiens
gguuauuuucauagauaaagauaguaauagagaagaugaauaucuguuacugcucuuuugucaugaguaauc

SEQ ID NO: 56213 - RNA, 78 nt, Homo sapiens
gguuauuuuuaugcagacauuguuccaaccacaacgacuguuuucgaaggugggugguauuuguuugguggaaggauc

SEQ ID NO: 56214 - RNA, 70 nt, Homo sapiens
gguguuucugguucuagaaccuugaggaaucaccacacugucuuccacaaugguugaacuaauuuacacu

SEQ ID NO: 56215 - RNA, 81 nt, Homo sapiens
ggugucucuguggcccuaggguagggcucuacugcagcccuaggguagagagcuaggccacuggggcuuccagauugcacc

SEQ ID NO: 56216 - RNA, 69 nt, Homo sapiens
ggugugugugugugcgugugcucaugcaugcacaagugaauuugcauacacaagcauacauguaccacc

SEQ ID NO: 56217 - RNA, 75 nt, Homo sapiens
gguuggugcaaaaguaauugcaguuuuuaccauuaagaguaauggcaauaaaaugcaguuacuuuugaaccaacc

SEQ ID NO: 56218 - RNA, 84 nt, Homo sapiens
gguuguaugaacuugaaaaaucccuugcucucucagacccucaguauggggucuggaaaaauaagggggacauacucaauagcc

SEQ ID NO: 56219 - RNA, 64 nt, Homo sapiens
gguuguggaagugaacaaccaaggcaggugguacugccauuuccugauagaacacuuuccaauc

SEQ ID NO: 56220 - RNA, 55 nt, Homo sapiens
gguugugguuccauuuguauucagucaauauggaggcaaauggaucccacaagcc

SEQ ID NO: 56221 - RNA, 102 nt, Homo sapiens
gguuuauuauagauuuagggaguacaagugcaguuucguuacaugugaauauugcguaguggcgaagucugggcuuuuagugcagccaucacuaguguagcc

SEQ ID NO: 56222 - RNA, 62 nt, Homo sapiens
gguuucuuugccaccaguggucuuggggagcccauccuuccaagacuagggagcagaaagcc

SEQ ID NO: 56223 - RNA, 57 nt, Homo sapiens
ggugggcauuccaaugguuaaaacucucauaaguagugacuagggauaugugccacu

SEQ ID NO: 56224 - RNA, 83 nt, Homo sapiens
gguguauaccuucccuguguuaugguuucuaauguccagggcggaagaggauauuacucccaauaucgcagggggcguacacc

SEQ ID NO: 56225 - RNA, 76 nt, Homo sapiens
ggugcaaggaugcuuggcccacccugagaggcguaauucgcccaucaacauugcugucaggcaucuuuuuagcacu

SEQ ID NO: 56226 - RNA, 60 nt, Homo sapiens
gguggaaccauauggaauugccaauacuuugacguacaaaaauggcaauaugguucuacc

SEQ ID NO: 56227 - RNA, 72 nt, Homo sapiens
gguggaauuauguuaagggucuugagguagggggaucaccuuggauucuccugguggacccuaaacgccauc

SEQ ID NO: 56228 - RNA, 85 nt, Homo sapiens
guucuuuucaugaugaaacuguuauguaucuugauugggugguggugauccuaugacucuaugcauguuucacaauucaaagaac

SEQ ID NO: 56229 - RNA, 61 nt, Homo sapiens
guugaaucauuucuugucuucaguuuucucagaagaacugaaacaaugagagauacauaac

SEQ ID NO: 56230 - RNA, 68 nt, Homo sapiens
guucuucugagaucaugucugugcuguucuucuacaucaugagguacaagcagucagauccagagaau

SEQ ID NO: 56231 - RNA, 74 nt, Homo sapiens
guugagugcaauucaggggagguggcuaugagaauuucaaucauggaaaucuaaguuuggauugagaucucagc

SEQ ID NO: 56232 - RNA, 104 nt, Homo sapiens
guugauacaaguaauuaaacauuuguccaaauccaugggauguacagaaucaagagugaagccuaauguaaacuauggacuuugggcaauaauuaugugucaau

SEQ ID NO: 56233 - RNA, 58 nt, Homo sapiens
guuccuuaacaguuuccucucauucagacacaacuucaaugaagugaaguuagggaac

SEQ ID NO: 56234 - RNA, 80 nt, Homo sapiens
guucagcugaugaagaacgggaaacaaauugcuuaauuuuaagaaauggcaaauguuuucuguugaaauguuuacugaac

SEQ ID NO: 56235 - RNA, 124 nt, Homo sapiens
guucuggguauagucugcaguccagagugagaacuuauggugauuuuuucaggccugucuauggccucccaaagaccagucagcaugagcuuccucccuucugagcccauaaagaccccagaac

SEQ ID NO: 56236 - RNA, 66 nt, Homo sapiens
guucaaguuuucucuuguggguuauacugugucccuuaauuuucagaggagagcaaagcuaugagc

SEQ ID NO: 56237 - RNA, 56 nt, Homo sapiens
guuauugcaguauagaggucuaagcaccaauucuuagaucauauacuugccaugac

SEQ ID NO: 56238 - RNA, 69 nt, Homo sapiens
guggcuuucaagugaccgucuuuugucauugaacuucaaguugacagugagaugucaugugaaaguuau

SEQ ID NO: 56239 - RNA, 66 nt, Homo sapiens
guucaguuugugaucauugucaaauaguguuuauuaagcauuuaccuauguguuacaaugcuggau

SEQ ID NO: 56240 - RNA, 65 nt, Homo sapiens
guucauccaugcaguaucaguacuucauuccauuuuaugacggaauaauauugcauuggauggau

SEQ ID NO: 56241 - RNA, 57 nt, Homo sapiens
guucauguuuucuuucacuuugucaguguaucacaugaagugaguguuaaacugaac

SEQ ID NO: 56242 - RNA, 71 nt, Homo sapiens
guuccagcuuauagguagauuuaaaauuugucugguuggcaauugguugaguuuaucuaaagaccugggau

SEQ ID NO: 56243 - RNA, 62 nt, Homo sapiens
guucccaccuuguuuguucuguggcuuccaggagggaagacuuggaccagagagguggggac

SEQ ID NO: 56244 - RNA, 62 nt, Homo sapiens
guuccuauucuagacguuccauauauggaauuccacagauggaaugccauuuauaauggaau

SEQ ID NO: 56245 - RNA, 77 nt, Homo sapiens
guuccugagcugggaagucaauauuucgcaccucaggcccugcugaguggaagaccagacuuuccaacaucaggaau

SEQ ID NO: 56246 - RNA, 69 nt, Homo sapiens
guuaagucugugggaugggcuuugagucuguguauuugggggcuaaagcuuagauccaugguggcugac

SEQ ID NO: 56247 - RNA, 86 nt, Homo sapiens
guuacuucucuguggcaguuuguuugugagguccagauuauguuacuaucuaucucacagguaacuguaggcucacaugagagaac

SEQ ID NO: 56248 - RNA, 63 nt, Homo sapiens
guuagcaguauggagcgaggcccagauccagacuucugucggccuaauuuuauaucuguggac

SEQ ID NO: 56249 - RNA, 66 nt, Homo sapiens
guuauagaaggaucuaaaugguaucccauauucaggcacagacacauugcagauccuucaaaugac

SEQ ID NO: 56250 - RNA, 89 nt, Homo sapiens
guguuuucccuuggauuuagcaauagccugcaucugcagcuuguuugaaggacuguuuggaggacuaugcucaggccauuggagcacac

SEQ ID NO: 56251 - RNA, 74 nt, Homo sapiens
guguuuaagacuuagcuagguuuccauuuagaucuucauaucuguugcauggaagaaaguuggguucuuggcau

SEQ ID NO: 56252 - RNA, 64 nt, Homo sapiens
guguuucuaguuagauccuugaggaaucaccacacuguuuuccacaaugguugaacuaguuuac

SEQ ID NO: 56253 - RNA, 119 nt, Homo sapiens
gugugcaugcaauaaauacauuauauauuuuuucuggcaauaggcagugucccaauaguaacacccuguugugcucuuauugugcagggaauauauuauuugguuaauuauuagcacac

SEQ ID NO: 56254 - RNA, 101 nt, Homo sapiens
gugugcauguguggugugaguguaugugcacauauggugcauaagugccuguguggggugguguacugugaugugugauguaugaaucuauguaugugcau

SEQ ID NO: 56255 - RNA, 73 nt, Homo sapiens
gugugccaucaaaguaucucaauaugguagaauuuuuucuccuuuguggaaauacuuguggugccauguacau

SEQ ID NO: 56256 - RNA, 57 nt, Homo sapiens
guguugggauuacaggcaugagccacugcaccuggcccuauguaguuuucucaauau

SEQ ID NO: 56257 - RNA, 127 nt, Homo sapiens
guguugguuauaugauguuuuccauucugaggauuuugccuuuuuaaaaguauaggccuggcauaaauuugaagaguauaggccuggcauaaauuuuuauguaaagauuaaggguggugauuaauau

SEQ ID NO: 56258 - RNA, 108 nt, Homo sapiens
guguagauuucagauggucaaggugccaugagggagggguggugccgcacaacagugcugucauucauccuuuccuuucagcaucuuaugacgguuugcaguuuauau

SEQ ID NO: 56259 - RNA, 66 nt, Homo sapiens
guguagccuaaguguacaguguuuauaaagucuacaguaguauacaguaaugucuuaggcugucac

SEQ ID NO: 56260 - RNA, 58 nt, Homo sapiens
guguauaucacaguacccucugaaaauacaguuuugagaacuaaaaugugguauauau

SEQ ID NO: 56261 - RNA, 89 nt, Homo sapiens
guguaugacagcuaaauuguuaaauccaaggucaugaagcuuuauccuuauguuuucuucuaaggguuucacagguuuagcucuuacau

SEQ ID NO: 56262 - RNA, 75 nt, Homo sapiens
guguauggaggugguuuugguuuggcuacaacagagaacugcugacucauucagaguagaaacacuuccauaugc

SEQ ID NO: 56263 - RNA, 66 nt, Homo sapiens
gugguguaucacacuuauugaccugcagauguuaagccacccuugcaucucuggugugaaacccac

SEQ ID NO: 56264 - RNA, 62 nt, Homo sapiens
gugguugcuuugugccaccauuauuccugacucugaauuuugaugcuaccuaaagcaaccau

SEQ ID NO: 56265 - RNA, 81 nt, Homo sapiens
gugguuucucaaaccucuuaauggccuguaaucuuucaacaguuaagaguauugcuaauaagagauuugagaacaauuugc

SEQ ID NO: 56266 - RNA, 62 nt, Homo sapiens
gugggguuucugagccuguuagaaagugacauucuuuacuuaucacaggucaggaaccuugu

SEQ ID NO: 56267 - RNA, 60 nt, Homo sapiens
guggguauucguuguagccauuuucuuuuccuagucaagguuuggacagugauuauccau

SEQ ID NO: 56268 - RNA, 84 nt, Homo sapiens
guggguguguuugugggggucuguauguguaugcaugucuacauaaacagacauauaugcauacccucaccaacuacacacuac

SEQ ID NO: 56269 - RNA, 61 nt, Homo sapiens
guggucccagcacuuacacaucugagccagcucaggcuggauggaaaguuuugagggccac

SEQ ID NO: 56270 - RNA, 74 nt, Homo sapiens
guggucucuaaguagaggaaucauuuugugcauuguuuccagagccaccagauuuacuuuacuauuagaaucau

SEQ ID NO: 56271 - RNA, 77 nt, Homo sapiens
gugucauuuauguauggaagucaguuuguuggcucuaaaccugaggcuuacauuuucuuucauauuuuaaaugcuac

SEQ ID NO: 56272 - RNA, 57 nt, Homo sapiens
guguccucgaguacacaucagggucucagccucggccacgugugucugugaguacac

SEQ ID NO: 56273 - RNA, 66 nt, Homo sapiens
gugucuuguagacaauguauaguuuuaguuugguguuuugcuguuauuguuguuguuuugagacac

SEQ ID NO: 56274 - RNA, 117 nt, Homo sapiens
gugugacuaggacgccucugugcauggauuuuaagauugugauguucagcagugugacuaggacgccucugugcauggauuuuaagauugugauguuuagcagugugacuaggacgc

SEQ ID NO: 56275 - RNA, 67 nt, Homo sapiens
gugugauuguuaauuuuaggugucaacuuuccuggauuaaggaauaccugaagagcuaauaaagcau

SEQ ID NO: 56276 - RNA, 95 nt, Homo sapiens
guguguacauuugggggauugggagagaaggauggauaaggggagaggcagagagauugucacccuuuauccauuuccucuuuugugugcuccac

SEQ ID NO: 56277 - RNA, 68 nt, Homo sapiens
guguguggguguguaucugugugugugugcaugcacaugcauaugcacgugcauacacacuugugugu

SEQ ID NO: 56278 - RNA, 70 nt, Homo sapiens
guguguguacaugcaugcaugggugugcgugcauaugucugcauauguauacgugugugugugcgcgugc

SEQ ID NO: 56279 - RNA, 68 nt, Homo sapiens
guguguguguguacaugugugcaagugcaugucaauguacacauaugugcacauuuacauauauacac

SEQ ID NO: 56280 - RNA, 77 nt, Homo sapiens
guguguugucuuucauuuagucccuccaguuuggguuucucuuguaggacuagggacauggggagcugauaccauac

SEQ ID NO: 56281 - RNA, 56 nt, Homo sapiens
guguguuuguguguguauaugaguguguccauauacauaugcagacacauacauac

SEQ ID NO: 56282 - RNA, 112 nt, Homo sapiens
guguuaugcuggguaagguuuggcaaauagguuuuauugcauugccaauuuuguuugauuggagauuugcuuugagggcuguguugcagaugacucuguauccguguaauac

SEQ ID NO: 56283 - RNA, 56 nt, Homo sapiens
guguucaaagcugauugagauuagauggauuuguuuauuaaaguuagcuuuagcau

SEQ ID NO: 56284 - RNA, 61 nt, Homo sapiens
guguucaaauucugacagagagcuggucucaaauuccagcagucacugaccaguugaauac

SEQ ID NO: 56285 - RNA, 55 nt, Homo sapiens
gugggaagcuggaacucccuccaucucucugugguaaggagguuccccuacccau

SEQ ID NO: 56286 - RNA, 96 nt, Homo sapiens
gugggaggauugcuuaagcccaagagagcaaggcugcagugagccaugaucacaucacugcacuccaguuugggcagcagagcaagacccucucuc

SEQ ID NO: 56287 - RNA, 90 nt, Homo sapiens
gugggcacagauggaguggaggccaaguucuuuuggugagauaguuuccugcuaagauucaucaguugagcugguugcuucaguucccac

SEQ ID NO: 56288 - RNA, 90 nt, Homo sapiens
gugggcauuugagaacugguagcacuugugauuaugaguaauaauguucaccuccccugcuccucacugucugccaggucucugccucac

SEQ ID NO: 56289 - RNA, 66 nt, Homo sapiens
guggggauuaagugagaguuggguggggcuccuugcuccucuucccaguuaauccuuaaucuccac

SEQ ID NO: 56290 - RNA, 88 nt, Homo sapiens
guggggccuggaaguguggaagugucuggggccaggggccugaccacauggcaccuucuuuagagauuuuuaaccaauccauccuugc

SEQ ID NO: 56291 - RNA, 79 nt, Homo sapiens
guggcacaacaaugugcauguacuuagugcuauuugaaccauacacuucaaaugacuaagaugguacauuuuauguuac

SEQ ID NO: 56292 - RNA, 101 nt, Homo sapiens
guggcacauggaaugccagugagacagaaccauucacuccccuggaaaggcgucuaaagccagggagccaaguggucuagcucagcguaucccacccccac

SEQ ID NO: 56293 - RNA, 98 nt, Homo sapiens
guggcagcuuggagacuguaggugggaggaaaaggaauugccaguucaguaaacuuugucaaugcauuauucucccacuucagacuuccgagggccac

SEQ ID NO: 56294 - RNA, 60 nt, Homo sapiens
guggaagguaaguuuugagcauuauauacuucugaaaaugucuuuauuuuaccuuccuac

SEQ ID NO: 56295 - RNA, 68 nt, Homo sapiens
guggaaugauaucucauuguggcuuugccuugcauuucacuaauggcucaagaugaauaucuuuucac

SEQ ID NO: 56296 - RNA, 55 nt, Homo sapiens
guggaaugcaguguugauucaacacucaauguugaaaucaaucaguguaauuuac

SEQ ID NO: 56297 - RNA, 86 nt, Homo sapiens
guggaggaagaguacaauagugacaaaucagcaugcaaacauuuuucggcugauuuugcacucuuguccucucaguguuccucuau

SEQ ID NO: 56298 - RNA, 58 nt, Homo sapiens
guggaggagaugggaagcaaaaucaguuguaugaauccaguucccauguuucuucuac

SEQ ID NO: 56299 - RNA, 58 nt, Homo sapiens
guggagucauacagaacaagacuguuucuuccuaacagugcuucugauaugaugccau

SEQ ID NO: 56300 - RNA, 81 nt, Homo sapiens
guggcaguuucuuaguucauuuuucuugcuuagaacaccugaggcugggugauuuauaaggaaaauaaauuuauuuguuac

SEQ ID NO: 56301 - RNA, 123 nt, Homo sapiens
guggccaaacugggauucagacccagggcuguuugguaccacccuuuuuccagaagccgggcaagugucaggccggcuugcuggcaggggucggugggcucugggucccuucccugaagccac

SEQ ID NO: 56302 - RNA, 58 nt, Homo sapiens
guggcgagaucauagcucauuguagucuccaacuccugggcucaagugaucuuuccac

SEQ ID NO: 56303 - RNA, 57 nt, Homo sapiens
gucuggcuuauuucacuuagcauaauguccuuuuuauguugucacaaauggccggau

SEQ ID NO: 56304 - RNA, 103 nt, Homo sapiens
gucugguggggacuuggagaaccuuuaugucuagcucagggauuguaaacacaccaaucagcacccuguguuuagcugaagguuugugagugcaccaaucgac

SEQ ID NO: 56305 - RNA, 76 nt, Homo sapiens
gucugguguaugccugauucuguggcuaugaaacauccggaauagacaaauccauagagcuaggaugcagacagau

SEQ ID NO: 56306 - RNA, 72 nt, Homo sapiens
gucuuacuuagauuugcaacuuagaaaaaucauuuugauuacaauauggaaaauagguugcgagagugagac

SEQ ID NO: 56307 - RNA, 58 nt, Homo sapiens
gucugcuaucuguggagauucacucagcugguuggugacagucucccgauggcuaggc

SEQ ID NO: 56308 - RNA, 79 nt, Homo sapiens
gucuuuacacacaaaguagauuagucuuccacuugaaacugcccaauggaagaauuucuuuuucugauguuuugaagac

SEQ ID NO: 56309 - RNA, 101 nt, Homo sapiens
gucuauuaggaaaauaaaggaauaaagcauggcuacuccauaggcagagcagcuccaaggccugcugguuggcuauuuuuaugguuauuucuugauuagau

SEQ ID NO: 56310 - RNA, 57 nt, Homo sapiens
gucuauuuggggauaacuaggcuucccguaucuggauaucuaaaucucuugauagac

SEQ ID NO: 56311 - RNA, 65 nt, Homo sapiens
gucucacagcuagcugcuuuauuauauguagggaaaccuggcaaaccaagcaguaguuguggggc

SEQ ID NO: 56312 - RNA, 65 nt, Homo sapiens
gucucaccuccaaauaucaucacauuggugauuaggccuucaauauaugacauuuggggguggac

SEQ ID NO: 56313 - RNA, 71 nt, Homo sapiens
gucucacuauguuggccaggcuggucucgaacuccuggguuugagcaauccuccugccauguagcugggau

SEQ ID NO: 56314 - RNA, 60 nt, Homo sapiens
gucucacugucaacauguauuuggggagacaucaaacucaguaugaauugacaggaugau

SEQ ID NO: 56315 - RNA, 78 nt, Homo sapiens
gucucuaagcuguaagaucugcagcugucauuaaaauaucuacaguucuguagcuuuuauaugcuuagccaaacagac

SEQ ID NO: 56316 - RNA, 58 nt, Homo sapiens
gucucuaaguaaacuugaaaggcauuguaggccauaaggauuucaagucuuaggugac

SEQ ID NO: 56317 - RNA, 66 nt, Homo sapiens
gucucuagccaaagcacaauccauugaauauuauuuauuguuuauuagagauauuugguuagggac

SEQ ID NO: 56318 - RNA, 101 nt, Homo sapiens
gucucugaguaaacaaagugcaugacugauauuugagauacuucaugccuuaucucuggauaucuacuuauguucuauuuucauuuguuuguuuuugaagu

SEQ ID NO: 56319 - RNA, 85 nt, Homo sapiens
gucucuucccaggaggguaugcacacucucccaggaggguaugcacacucucccaggaggguaugcacacucccccuggagggau

SEQ ID NO: 56320 - RNA, 62 nt, Homo sapiens
gucugacacagugauuaguaaauuaauucaacaaauuauugagcaucuacuguguuccagac

SEQ ID NO: 56321 - RNA, 86 nt, Homo sapiens
gucugagggggaucuuguggugcuuuuacgugggccugccauggcugcccauguaacaaucagcaugcccuuccccgcucugaggc

SEQ ID NO: 56322 - RNA, 89 nt, Homo sapiens
gugaugauugugcuggaggaauaugcuuauuagcaagaaauacuaaaguauuugggcaugauggggcauuuucacaguuuaagcuuugc

SEQ ID NO: 56323 - RNA, 113 nt, Homo sapiens
gugauauauauuuuuuuauuuuugaaagaugaacuggauuggaagauuuaucuuuguugugucuauuuugcaauugaggaaucauuuauuuuuagagaggugaauaaauucac

SEQ ID NO: 56324 - RNA, 69 nt, Homo sapiens
gugacugcauccauccaggcuuuagcugcaagcuggauccuguuucucuuggaaagugcuagaagucac

SEQ ID NO: 56325 - RNA, 78 nt, Homo sapiens
gugagaaaugagacauuaaaguguguuuggagccuuuuauauauuucaacuuuaaaaacaauuuggugucuccaucau

SEQ ID NO: 56326 - RNA, 67 nt, Homo sapiens
gugagaacugugucuuauaaacguugcugucuuagaauuaaugacgaggccgggcacaguugcucac

SEQ ID NO: 56327 - RNA, 84 nt, Homo sapiens
gugagcagacuuccuuggagaugaagcagaguugcugugaucuaauucauugacucaguuguuagucuucauuuacuuucucac

SEQ ID NO: 56328 - RNA, 122 nt, Homo sapiens
gugaggcuggagggggagucugggggaggaggugaggcuagauggggauguguccagggcagguagccuugagaccccuuuauuuagccccagcucagggaacccucccacaguggccuugc

SEQ ID NO: 56329 - RNA, 91 nt, Homo sapiens
gucuuuguccuugguucuaugucaaggugaagaaagaucagcagaauguuggauuucuagcaccuuauuuuuaacuaagcaacgcagagau

SEQ ID NO: 56330 - RNA, 61 nt, Homo sapiens
gugaaagguaggaacagggugcaggucaccagacucugaggccaguguucuuccucuuugc

SEQ ID NO: 56331 - RNA, 56 nt, Homo sapiens
gugaacuaaggauucaaacuucagauuucaaaguccaaagugaaugcuuuguucac

SEQ ID NO: 56332 - RNA, 73 nt, Homo sapiens
gugaaguuuuugugaggccuaaagaauaaauuuaauuuucucuggguacauuugucucauguaauaacuuuau

SEQ ID NO: 56333 - RNA, 58 nt, Homo sapiens
gugaaguuuuuugcugagagucccucugcgugguggccucugugguauagaacuucau

SEQ ID NO: 56334 - RNA, 84 nt, Homo sapiens
gugaauauuggagaagugcuuuuggacuaacaguaguaccauaaauaacuguuacugaguuaaagacaucucuaugugauuuac

SEQ ID NO: 56335 - RNA, 70 nt, Homo sapiens
gugaauuagguaguuucauguuguugggccuggguuucugaacacaacaacauuaaaccacccgauucac

SEQ ID NO: 56336 - RNA, 68 nt, Homo sapiens
gugacaauagauauaaggaaccuuugcaaacuagaguguguuaugcaaauguuaggugucauuaucau

SEQ ID NO: 56337 - RNA, 60 nt, Homo sapiens
gugacagucaaagacaugacuugaugcggagaugugaagugugacuuuuuugacugucac

SEQ ID NO: 56338 - RNA, 64 nt, Homo sapiens
gugacauguaaggcucucucuguuaugucuagguggacacagcaaugcagugccuugcagucau

SEQ ID NO: 56339 - RNA, 58 nt, Homo sapiens
gugacauuauuucagcuacaugagugaccuuagacucauguggcugaaauaaugacau

SEQ ID NO: 56340 - RNA, 69 nt, Homo sapiens
gugacauuuaaagcuggcguuacaguuuguagguuuuacaaaucauggcucuagcuuacaaauguacac

SEQ ID NO: 56341 - RNA, 63 nt, Homo sapiens
gugcugcuggaacauauuauuuuuguucuuaaaauggacaagacuucuuguauucuaguucac

SEQ ID NO: 56342 - RNA, 62 nt, Homo sapiens
gugcuggcauuauagucaugagccacugcgcccggcccauaugucuauucuaaugccagcac

SEQ ID NO: 56343 - RNA, 79 nt, Homo sapiens
gugcggauggauugcuaauguggggauuuggggggaaaucaaaguguucucaaaugcuguauuguaguaauacuugcac

SEQ ID NO: 56344 - RNA, 60 nt, Homo sapiens
gugccucaggagacuauucagcaagcaacaauucugcuucagaguagcugucugaggugc

SEQ ID NO: 56345 - RNA, 80 nt, Homo sapiens
gugcguuauuagagcaaguuuucugacauauaaaccuggucccauauuauuuaucuguuuaaaacuguucagugauguac

SEQ ID NO: 56346 - RNA, 78 nt, Homo sapiens
gugauguugagauguauguauauaauguguagugaucagauaagguuaauuagcauacauagcaucucaaacauuuac

SEQ ID NO: 56347 - RNA, 85 nt, Homo sapiens
gugauuaugacauguauuuccaggauuuuagcauuucaaauagaaugugcauuuuuaaauacugaaauauacggucauccaucac

SEQ ID NO: 56348 - RNA, 97 nt, Homo sapiens
gugauucuccugccucagccucucaaguacaugggauuacaggugcgcgccaccaagcccaucuaauuuuuguauuuuaguagagacgggguuucac

SEQ ID NO: 56349 - RNA, 84 nt, Homo sapiens
gugcagcaagccuucgauuugcucacaguuguuuuaaacauuuuuaaaaguuuaaaugcacauacuugagaaaagcugcugcac

SEQ ID NO: 56350 - RNA, 72 nt, Homo sapiens
gugcauggaaggagaggaaugaaugacuguugaagccagauggccuugcucauugauucucuccuuucccgc

SEQ ID NO: 56351 - RNA, 94 nt, Homo sapiens
gugcauguacaugugugcaugcauguguguguguccaugugugugcauguguguguggacauguacauauguguaugugugccugugcaugugu

SEQ ID NO: 56352 - RNA, 79 nt, Homo sapiens
gugcauuuagaagcauugauccacaggcgugcuauuacucagcacuccuguggauacaaugauaaacuucacucagcac

SEQ ID NO: 56353 - RNA, 76 nt, Homo sapiens
gugccacacuaagaagaaauaaauauuguaauugaacuaugauucagugcuuuuuguugucaucauuguuuggcau

SEQ ID NO: 56354 - RNA, 63 nt, Homo sapiens
gugcaggugcaggagucagguccaggacccaugaggcccucagacacugcccuccaccugugc

SEQ ID NO: 56355 - RNA, 65 nt, Homo sapiens
ggggggcauuggcacagguguagaaaaugaagccugaggguccccugacuuguccgagguccccc

SEQ ID NO: 56356 - RNA, 77 nt, Homo sapiens
gggguagcccauguggcugaggcuucuagacacauuucaccucucaugggucagagacagacacaucgggcugcucu

SEQ ID NO: 56357 - RNA, 58 nt, Homo sapiens
gggguuccugugauuguuagaaagugacauucuuuacuuaucacaguucaggaacucu

SEQ ID NO: 56358 - RNA, 62 nt, Homo sapiens
gggguuuacacauugaugagcuuuaaggaauaaaagauaagguccuuaaauguguaaccucc

SEQ ID NO: 56359 - RNA, 129 nt, Homo sapiens
ggguaacacaugcuaaaauaagguguugcaccucagcagugguuggaggguaugaugagggcuucuacuuuauugcuauuauuugaccauuguacaaugagacuugauucauguuaaaguuaugaaccc

SEQ ID NO: 56360 - RNA, 80 nt, Homo sapiens
gggggcgagggauuggagagaaaggcaguuccugaugguccccuccccaggggcuggcuuuccucugguccuucccuccc

SEQ ID NO: 56361 - RNA, 78 nt, Homo sapiens
gggggaaaauacauauuuuguuuacauuaaauuuugaagugauuuaggcuuuauugaaaacaauacuggccuucccuc

SEQ ID NO: 56362 - RNA, 55 nt, Homo sapiens
gggggacuggccaugcucuaugaguuaguuuaauggaguguagaagccagccucc

SEQ ID NO: 56363 - RNA, 85 nt, Homo sapiens
gggggauaaagcaagucucuggccucaccccagagauucugacucagcagaugaggccuggaaauaugcauuuauaagguccccu

SEQ ID NO: 56364 - RNA, 73 nt, Homo sapiens
ggguaaugaguauguucuguauuuucacugugauauuaauuucacugguauauacauaugucaaaauuuaccc

SEQ ID NO: 56365 - RNA, 68 nt, Homo sapiens
ggguacaugugcacaacaugcagguuuguuacauauguauaccugugccauguuggugugcugcaccc

SEQ ID NO: 56366 - RNA, 68 nt, Homo sapiens
ggguacaugugcacaacaugcaguuuuguuacauauguauacaugggccauguuguugugcugcaccc

SEQ ID NO: 56367 - RNA, 68 nt, Homo sapiens
ggguacaugugcacaacaugcaguuuuguuacauauguauacauguaccauguuggugugcugcaccc

SEQ ID NO: 56368 - RNA, 68 nt, Homo sapiens
ggguacaugugcacaacgugcaggcuuguuacauacguauacacgcgccauguuagugugcugcaccc

SEQ ID NO: 56369 - RNA, 68 nt, Homo sapiens
ggguacaugugcacaacgugcagguuuguuacauauguauacauaugacauguuggugugcugcaccc

SEQ ID NO: 56370 - RNA, 68 nt, Homo sapiens
ggguacaugugcacaacgugcagguuuguuacauauguauacaugcgccauguuggugugcugcaccc

SEQ ID NO: 56371 - RNA, 68 nt, Homo sapiens
ggguacaugugcacaacguguagguuuguuacauauguauacaugcgccauguuggugugcugcaccc

SEQ ID NO: 56372 - RNA, 68 nt, Homo sapiens
ggguacaugugcacaaugugcagguuuguuacauauguauacaugcgccauguuggugugcugcaccc

SEQ ID NO: 56373 - RNA, 62 nt, Homo sapiens
ggguagcaaauggcugucaaguagccaagagggcugagaguugacaaggagccauugcaucu

SEQ ID NO: 56374 - RNA, 86 nt, Homo sapiens
gggguccucaaugauuuuuaguguaaauggguucugagaucaaauaguuucagaaccucugauuuauacuuuaccguggugauccc

SEQ ID NO: 56375 - RNA, 81 nt, Homo sapiens
ggguccugcuguugcucaggcuggagugcaguguugugaucauggcucacugcagccuugagcucucagaucaaggugccc

SEQ ID NO: 56376 - RNA, 95 nt, Homo sapiens
gggccuuucggguuugguucaguauugcaccuggaguccuacaggaaaugaaagaguaauggacccagauuugucugaauccagagucgaagccc

SEQ ID NO: 56377 - RNA, 58 nt, Homo sapiens
ggggaaauuaucccagaagauaacagaaggguguucuggaacuucaaauaauuucccc

SEQ ID NO: 56378 - RNA, 108 nt, Homo sapiens
gggcuaggcugagcagcagaggagagauuggcuguggagaguauagaugacacaugaggccaggugaucucugagaaaaguuucucccaucuguugcuuagauugccc

SEQ ID NO: 56379 - RNA, 81 nt, Homo sapiens
gggcugauuacaagguacacuuaaacugcuaaaaugauaguucauguuauucauagugcuaagguguaucugguaaugccc

SEQ ID NO: 56380 - RNA, 92 nt, Homo sapiens
ggggccuggggagcgugguggcacugagcaagcucacaaaggccucugugucgccuggcagcucaggccccgcgcugagggcccugggcuuu

SEQ ID NO: 56381 - RNA, 78 nt, Homo sapiens
ggggcgacgaugauaucacucccaauaucgcagggguugcacacaccacuugcgauguggggagugagagccagcccc

SEQ ID NO: 56382 - RNA, 88 nt, Homo sapiens
ggguuacuuugucuauuuuuaaaaucggguuauaaguuuucuuguuauugagcuguaugaguuguuuauaaauuuuggaaguuagccc

SEQ ID NO: 56383 - RNA, 66 nt, Homo sapiens
gggugcguucugagaaguguguuguuaggcaguuucguccuuaugugaacaucauagaaugcacuu

SEQ ID NO: 56384 - RNA, 56 nt, Homo sapiens
gggugucuucagcuacauuggguugcccuugacccucauugugauugaagucaucc

SEQ ID NO: 56385 - RNA, 62 nt, Homo sapiens
gggugugcaaaucucugaguaucuuuucaaauaaaggaaggaaauuaguuauuugccuaucu

SEQ ID NO: 56386 - RNA, 88 nt, Homo sapiens
ggguugguuccaagucuuugcuauuguaaauagugcugcaguaaauauacaugugcauaugucuuuauaguagaaugauuuauaaucc

SEQ ID NO: 56387 - RNA, 77 nt, Homo sapiens
ggguuguagugaggguuacgugaacauucauauaaaacaacuacaacaguguucaguaaauguucuuacuauagcuc

SEQ ID NO: 56388 - RNA, 58 nt, Homo sapiens
ggguuucuggucugugugauggagggcagcgugaacccaucacuggagaaggaaaccu

SEQ ID NO: 56389 - RNA, 83 nt, Homo sapiens
gguaacaucuuuauagcagugugaggacagacuaacacaucaucuguauuaguccguuuucacacugcugauaaagacauacc

SEQ ID NO: 56390 - RNA, 109 nt, Homo sapiens
gguaaggcugaaguaauagaaauaacuagaaaggagacaguugcuguuggaugcuucuuaaaagccuccuguugcacaccgucucucugguucuucugacuuucuugcu

SEQ ID NO: 56391 - RNA, 98 nt, Homo sapiens
gguaaguucgaucuuuucuuggugucuuccagucuuuucuguuaugcacuagaugugcuugacuaggaggcuggaggaugaggcuggagagcucuauc

SEQ ID NO: 56392 - RNA, 82 nt, Homo sapiens
gggucuaaugguauuucuaguucuagauccuugaggaaacacuacacugacuuccacaaugguugaacuaguuuacaguccc

SEQ ID NO: 56393 - RNA, 88 nt, Homo sapiens
gggucuugcucuguugccuaggcuggagugcaguggcgcaaucucagcucacugcaaccuccaccuccuggguucaagcgauucuccc

SEQ ID NO: 56394 - RNA, 93 nt, Homo sapiens
gggucuuuaugguaauggcaauaauagcuaccauuuauuaaguauuuauauuggggaugguuaaguauaugcauugucucuuuauaacuaccc

SEQ ID NO: 56395 - RNA, 76 nt, Homo sapiens
ggguggagguggagguauaagcccagaagaguauucuugaauuuuuuuggcuagaaauauaccuccaaauacaccu

SEQ ID NO: 56396 - RNA, 57 nt, Homo sapiens
ggguggaucacuugagaccaggaguuggagaccagcuugggaaacagagugaaaccc

SEQ ID NO: 56397 - RNA, 83 nt, Homo sapiens
ggguggcagcuggguucagagugggcugcggcccuccauaugugaguuucugggcuucaucccucaaacuccagcaaccauuc

SEQ ID NO: 56398 - RNA, 117 nt, Homo sapiens
ggguggugaccugggauucaaucugugaggaaggaaaccugcuagcaggacucucacuuugcugagcauuauuuuuccuucuuccuuuuugcccaauaaauuccauuuuccucaccc

SEQ ID NO: 56399 - RNA, 81 nt, Homo sapiens
gguaucuuuauagcaguaucccaccaucugguagcaauuuacuguauuaguccguucucaugcugcuaauaaagacauacc

SEQ ID NO: 56400 - RNA, 85 nt, Homo sapiens
ggucagagguuugcacauugcaccuuuuguaugguccaaguuaagaauauacacaaauucaugguuaauggugaauggcuuggcc

SEQ ID NO: 56401 - RNA, 59 nt, Homo sapiens
gguauuauagguugcuguggggcuugaauaaaauagccaucagagugagauauaagauc

SEQ ID NO: 56402 - RNA, 63 nt, Homo sapiens
ggucauaaagacacuuggcaugauuucagucuucucaaauuuguuaaggcuuguuuugagacc

SEQ ID NO: 56403 - RNA, 63 nt, Homo sapiens
gguccaugaauuccuuggcaaaacacccaaguugaaaaccucacuugacuguccagguggacc

SEQ ID NO: 56404 - RNA, 70 nt, Homo sapiens
gguauuucuaguucuagauccuugaggaaucaccacacugucuuccacaaugguugaacuaguuuauacu

SEQ ID NO: 56405 - RNA, 66 nt, Homo sapiens
gguauuucuaguucuagauccuugaggaauccacacugucuuccacaaugguugaacuaauuuacu

SEQ ID NO: 56406 - RNA, 70 nt, Homo sapiens
gguauuucuaguucuagauccuugaggaaucgccacaccgucuuccacaaugguugaacuaguuuauacu

SEQ ID NO: 56407 - RNA, 89 nt, Homo sapiens
gguauuuuauucucuuuguagcaauugugaaugggaguuuacucgugauuuggcucucuguuugucuguuacugguguauaguaaugcu

SEQ ID NO: 56408 - RNA, 74 nt, Homo sapiens
ggucaccaggugcuuuucagaagcuguugaccguaauucucuagcaguacauaaaaagcauccuggucuuggcc

SEQ ID NO: 56409 - RNA, 63 nt, Homo sapiens
gguagaggaugaggagguuggacguggugguggcuuugccuuggauauuccucuuccucuauc

SEQ ID NO: 56410 - RNA, 71 nt, Homo sapiens
gguagaggugggagucuugcuauguugcccaucucaaacuccugggcucaaguaauccucccgccuuggcc

SEQ ID NO: 56411 - RNA, 123 nt, Homo sapiens
ggcugaggcaggagaaucgcuugaacccuggaggcggagguugcagucagccgagaucguaccacugcacuccagggggcaacagugcaagacuccucaaaaaaaaaaaaaaaaaaauuagcc

SEQ ID NO: 56412 - RNA, 83 nt, Homo sapiens
ggcuccagagaucacaguuggcaaguggcugagcugggacgguauccagcucuaucugguuccaaagucuggucucuaaggcc

SEQ ID NO: 56413 - RNA, 59 nt, Homo sapiens
ggcuaacacagggcaagucaggcuccauuccuuugagagucaacugguucuguguaguc

SEQ ID NO: 56414 - RNA, 86 nt, Homo sapiens
ggcuaacacuaucugccuuacagggaugccaugagaauuaaauggaauaaugccucugaggaagauuguguuuucuaaaaauggcc

SEQ ID NO: 56415 - RNA, 90 nt, Homo sapiens
ggcugcacuugagugacauaaagugggggcuguguuggucauguacauagcauaucccacaugucagagauucccuuuuagugccuagcu

SEQ ID NO: 56416 - RNA, 59 nt, Homo sapiens
ggcugcuguuucucuuucagcaucgguaucugagaugcugucucugggaaacagcgauc

SEQ ID NO: 56417 - RNA, 60 nt, Homo sapiens
ggcuggaguguguugcagaugaaggaagauuucucaucaccccacacacucucugcagcc

SEQ ID NO: 56418 - RNA, 88 nt, Homo sapiens
ggcugggacugaggucauguucugucagguuccaaagagcgccaggaagacucugagaccacagagcacggccugcuuucucccagcc

SEQ ID NO: 56419 - RNA, 82 nt, Homo sapiens
ggcugggauaagugagugauucaguguuagcuuuagugucaauagaacuugcacugaaauauucaacuuuuuucccacagcc

SEQ ID NO: 56420 - RNA, 89 nt, Homo sapiens
ggcugggucaaacgguauuucuaguucuagauccuugaggaaucaccacacugucuuccacaaugguugaacuaguuuacagacccacc

SEQ ID NO: 56421 - RNA, 89 nt, Homo sapiens
ggcugggucaaaugguauuucuaguucuagauccuugaggaaucaccacacugucuuccacaaugguugaacuaguuuacagacccacc

SEQ ID NO: 56422 - RNA, 58 nt, Homo sapiens
ggcuggugacccugugguggugacacuagagcccacccauucacggggagcagcagcc

SEQ ID NO: 56423 - RNA, 112 nt, Homo sapiens
gggauugcuggguuggaugguaauucuguuuuuaguucuuugaggaauugccacauugcuuuccacaauggcugaacuaguuuacucucaccagcaguguauaagugauccc

SEQ ID NO: 56424 - RNA, 99 nt, Homo sapiens
gggcaagauaaagaaauaaaggguauucaaauaggaagucaaauuaucuguuugcagaugacaugauuguauauuuagaaaaccugaucuuaucagccc

SEQ ID NO: 56425 - RNA, 78 nt, Homo sapiens
gggcacugccaagaagugucuaagcaggaggugcugugguccagucugcacuucggagacauucucuuggcauagccu

SEQ ID NO: 56426 - RNA, 59 nt, Homo sapiens
gggagcuuggaggcccggcugguuuuucuaaggaguuggccggguggccauggcugccc

SEQ ID NO: 56427 - RNA, 57 nt, Homo sapiens
gggaggagagugaggaggauaauuuaaaacucauuaugcuuuggucauacuucuucc

SEQ ID NO: 56428 - RNA, 89 nt, Homo sapiens
gggaggaucgcuugagcccgggaugcggaaguugcagugagccaaaauagugccauugcagcccacccugggugauagaaugagagccu

SEQ ID NO: 56429 - RNA, 81 nt, Homo sapiens
gggaggcauuucuaucacccauugcacaaagagggaaacugaggccagagagggcacuugcuuccucugugcaauccuccc

SEQ ID NO: 56430 - RNA, 90 nt, Homo sapiens
gggaggcuggaucccugcagaaacggcuuugaggguaguucuuucagcaaguacaccaugucuguuucugguuuggcuuuucaguuuccu

SEQ ID NO: 56431 - RNA, 72 nt, Homo sapiens
gggauaggaacuuugaaagucauuucuucuaaguagcaaagcugcuuguugaauugcauuuuccauuaucuu

SEQ ID NO: 56432 - RNA, 72 nt, Homo sapiens
gggcaucuagguugauuccaugucuuuucuauuaugaauagugcagugaugaaccuaggaguggaugugucu

SEQ ID NO: 56433 - RNA, 97 nt, Homo sapiens
gggccauguuggcaauaguugaucugugugauuggaugcauuuucaaagaguuuguuaauggugccuuucugcauagacaguguuccacaaucgccu

SEQ ID NO: 56434 - RNA, 130 nt, Homo sapiens
gggcccggagggcagcucacugggguugaggcugugaggcacugcugcuuuccaggagaacgaacucagcacacagucuggggcagacaguccuucagcucuucucacuguguguuucucuucugggucc

SEQ ID NO: 56435 - RNA, 91 nt, Homo sapiens
ggcugugaaccaggucaucaggacgggucaucugcuuccccacgggugugguugggcugcagggaccuuguugcugagacuaggaacagcu

SEQ ID NO: 56436 - RNA, 60 nt, Homo sapiens
ggcuuagagcaaaccagucacaaauuaaagagaaacaaaugugaccucugucucugaguc

SEQ ID NO: 56437 - RNA, 105 nt, Homo sapiens
ggcuuagcuguuuuaagccacccucucuccauugcucuaaucagguugggauggguuuuuccugagacgaauggagugaacauggcgcuaggacagcugucgguc

SEQ ID NO: 56438 - RNA, 67 nt, Homo sapiens
ggcuuauuaagucacacuagacaacugagguugccuaagacgucauugucuuggacuugcaagggcc

SEQ ID NO: 56439 - RNA, 120 nt, Homo sapiens
ggcuucuaguugacagcuggaaauggaggcauuucuggcagagaaacaggucuaaggaggcagcgccagcuuccucagguccugucucuacaaggccccauugcuguaacuagccaagcc

SEQ ID NO: 56440 - RNA, 59 nt, Homo sapiens
ggcuucuguccagggucucgggaauuuggcuuccaugucagggacgcuugacacaagcc

SEQ ID NO: 56441 - RNA, 91 nt, Homo sapiens
ggcuugcccaggaauugcaacuguugagguauagaacaccuuucaaguuuauuuagaaacccaaagugcuuuauaccacaguggugaagcc

SEQ ID NO: 56442 - RNA, 92 nt, Homo sapiens
ggcuugcuuguauacauacaugucuucucuccccucagggacccuguguuccuugagagaaaaggccaugccuuauguagcucaggaaugcc

SEQ ID NO: 56443 - RNA, 70 nt, Homo sapiens
ggcugugugaugugucaucugagagaguggguaaccccuauucccagcacauggccauuuauuuagagcc

SEQ ID NO: 56444 - RNA, 64 nt, Homo sapiens
gggaaagaaagagaacauucguguucucaaagccaaagagaaucacuguuaacaauuucuuccu

SEQ ID NO: 56445 - RNA, 64 nt, Homo sapiens
gggaacuuaguaucuuacucuucucagcaagggaguuagcugagaaugacugggcaugcugccu

SEQ ID NO: 56446 - RNA, 90 nt, Homo sapiens
gggaacuuguuaaagauucagauucuuaggccucacccuagagcuaacaaaucagaguaucugggagacuacauuuuuaacaagcuuccc

SEQ ID NO: 56447 - RNA, 66 nt, Homo sapiens
gggaagugugcagaguucucuuagaacacccagucacaugguguagagacugcucuuacacuuccu

SEQ ID NO: 56448 - RNA, 98 nt, Homo sapiens
gggaauaaacauggagcucaucuagcauagagguuggcaaacuuucugucaagaaucagauaguacauauuuuuggcuuugugggcucuaugguuccc

SEQ ID NO: 56449 - RNA, 73 nt, Homo sapiens
gggaauuaaguuaggcuucagcagucugagccuuggugugggcggagacauacaugaucuuaauuuauaucuu

SEQ ID NO: 56450 - RNA, 73 nt, Homo sapiens
gggaauucuuaugcacuguuguugugaauguaaacuauuucagccacuguggaaagcaguguggagauuucuc

SEQ ID NO: 56451 - RNA, 109 nt, Homo sapiens
gggacagagagagaggaggagguuggcuugagaugaagcuagaagaaugggcaaacuucacuucucuuuguucauuuguaccccaaguuguauucaucccuuucugccc

SEQ ID NO: 56452 - RNA, 67 nt, Homo sapiens
gggacaucuuucuagucagggucaaaauacugagaaguuauuucccaguggcuagagcagauauccu

SEQ ID NO: 56453 - RNA, 98 nt, Homo sapiens
gggacugugcaggagaaguuuugaugcacuuguaggacauuaguguuccaugagaugcaucaaagcugccucugcuaaaacugaaaauggguggucuc

SEQ ID NO: 56454 - RNA, 109 nt, Homo sapiens
ggccugugguaggaagcuuuggagcaguuagggcaaugggaccauuuguucacacaaacaucccugaguaucuaauguguuucugaguuuccuagcagaaauccaggcc

SEQ ID NO: 56455 - RNA, 109 nt, Homo sapiens
ggccuccuccccacucaugccccgaaugacugucagggcagucauugcagugaagccaugcaggaaugcccgacggcucaugaagggggccacgaacaggacagaggcc

SEQ ID NO: 56456 - RNA, 82 nt, Homo sapiens
ggccggcgcuuaccucugcuacaggguauguuuccacugacagacgcgcuggcgagaugcucgugugcagagagcacuggcc

SEQ ID NO: 56457 - RNA, 60 nt, Homo sapiens
ggcgauaaccacguuuacccuucauuaaaguguuuaugagcaguaaauguaucuauugcc

SEQ ID NO: 56458 - RNA, 60 nt, Homo sapiens
ggcgcaguagcggggcccagagcauacaagggauugggcuuuggcuucucugcugcagcc

SEQ ID NO: 56459 - RNA, 94 nt, Homo sapiens
ggcgccugcaucugucugguuucuccugaggauuucaugcuaucucauaacaugcuggaaggucaaagggaaagcagacaaagccaaaggagcc

SEQ ID NO: 56460 - RNA, 69 nt, Homo sapiens
ggcggagcuugcagugagccgugcagugagccaugcagugagcugagaucacgccacugcacuccagcc

SEQ ID NO: 56461 - RNA, 86 nt, Homo sapiens
ggaguuucccucuuguugccuaggcuggauugcagugacaugaucucggcucacugcaacuccgccucccagguucaagcaauucc

SEQ ID NO: 56462 - RNA, 89 nt, Homo sapiens
ggaguuuugcucuuguugccuaggcuggagugcaguggcacaaucuuggcucacugcaaccuccaccucccggguucaagugauuaucc

SEQ ID NO: 56463 - RNA, 97 nt, Homo sapiens
ggaguuuugcucuuguugccuaggcuggaguucaguggcgcaaucuuggcucacugcaaccuucaccucccaggucuccagguucaagcgauucucc

SEQ ID NO: 56464 - RNA, 60 nt, Homo sapiens
ggauaaaagucaucacaacuggagugagaugguaucucauuguaguuuugacuuuuauuu

SEQ ID NO: 56465 - RNA, 76 nt, Homo sapiens
ggaguugauugagguaaagcgaggucuccuacaagaugaugcacauccuacucuuguaaccuaugcugaccauucc

SEQ ID NO: 56466 - RNA, 79 nt, Homo sapiens
ggagggugcuaacguggucaccugaauuaugcaugucuauuguguucaaauaucauaaaucggugcaugaauacccucc

SEQ ID NO: 56467 - RNA, 60 nt, Homo sapiens
ggaguaaaugugugcauuucaaacuuuauguacuacuuuguaacacacacuguuuacucc

SEQ ID NO: 56468 - RNA, 62 nt, Homo sapiens
ggaguauucccugguuaaggaaagguuuacuaaagagaacuuccugagagaggaguaacucu

SEQ ID NO: 56469 - RNA, 88 nt, Homo sapiens
ggagucucgcucuguugccuaggcuggagugcaguggcacgaauucggcucacugcaaccuccaccucccagguucaagcaauucucc

SEQ ID NO: 56470 - RNA, 88 nt, Homo sapiens
ggagucucgcuguguugccuaggcuggagugcaguggcaugaucucggcucacugcaaccucugccucccagguucaagcgauucucc

SEQ ID NO: 56471 - RNA, 88 nt, Homo sapiens
ggagucucucccuguugccuaggcuggagugcaguggcgcgaucucggcucacugcaaccuccaccucccggguucaagugauucucc

SEQ ID NO: 56472 - RNA, 86 nt, Homo sapiens
ggagucuugcucuguugccuaggcuggagugcaguggcaugaacucggcucacugcaaccuccaccucccagguucaagcgauucu

SEQ ID NO: 56473 - RNA, 80 nt, Homo sapiens
ggagugaauuauagcuaacaucugugaaaaguuauguaucugaaugcacauuuuccagcaugagcuuuaguaccaacucc

SEQ ID NO: 56474 - RNA, 81 nt, Homo sapiens
ggagcauaggaugcacuguguguauuagcucauuuguauuuuucccacuucaaugagcuggucuacguguguaugagcucu

SEQ ID NO: 56475 - RNA, 60 nt, Homo sapiens
ggagccagaaaugcugugguuggggcauuucaucaaccaaaucacaguuguucugccuuc

SEQ ID NO: 56476 - RNA, 71 nt, Homo sapiens
ggagcuugaaagugauguccaggcuuucaggcuaauugcuggaaagccccagucauuuucuaaaaaguuuc

SEQ ID NO: 56477 - RNA, 80 nt, Homo sapiens
ggaggaagggaggaaagauguaauauuaucuaaauaucguagcaacauuuggagauagauacauuuuucuccauuuuucu

SEQ ID NO: 56478 - RNA, 88 nt, Homo sapiens
ggaggauugcuugaccccaggaguuggagguugcagugaacuaugauaauaccauugcacucuagucugggugacagagcaagacucu

SEQ ID NO: 56479 - RNA, 61 nt, Homo sapiens
ggaggcaaagcacuuugcuuggaaauauuuuucacaugacauacaaggugcuucgaccucc

SEQ ID NO: 56480 - RNA, 63 nt, Homo sapiens
ggauacugugauuuuuuccuauuccauagauugagaaucuaggcuguagagaaguucaguacc

SEQ ID NO: 56481 - RNA, 67 nt, Homo sapiens
ggauauaaagaguuaguaaaauuuccucuauccauuugggguauaggaaacaaacucucuuaaaucu

SEQ ID NO: 56482 - RNA, 129 nt, Homo sapiens
ggauauauacccacaguaggauugcuggaucauaugauagcucaauuuuuaguuuuuuaaggaaacucuaaauuguucuucauagugauuguacuaauuuacauuccuaauaacuguguaugaaggucc

SEQ ID NO: 56483 - RNA, 84 nt, Homo sapiens
ggaucuugcugugucacccaggcuggagugcaguggcgcuaucaugguucacuguagccucagccucuugggcucaagcaaucc

SEQ ID NO: 56484 - RNA, 59 nt, Homo sapiens
ggaugacauuacagucacuugcuguuggcuuugcucacagucaagaugugugucuauuc

SEQ ID NO: 56485 - RNA, 72 nt, Homo sapiens
ggaugagaugaauaccgacgauguagaaaaacugggcuaaacaauuuauauaaguacugcuucaucucaucc

SEQ ID NO: 56486 - RNA, 86 nt, Homo sapiens
ggaucuuauuuuugccaucaauuuaucuauguaacaagugguuuauuuauucauuggaugucugaaaugauuuaagaaugagauuc

SEQ ID NO: 56487 - RNA, 89 nt, Homo sapiens
ggaugaucagaaaggagaucaguaguaagauggaggaacaccagggaaagaucaucuugccacuucauccccuuuccagcuccccaucc

SEQ ID NO: 56488 - RNA, 60 nt, Homo sapiens
ggauuuuaauguccaaaagaaaaggauuugauaaacccuaauauuuuggauuagaaaucc

SEQ ID NO: 56489 - RNA, 68 nt, Homo sapiens
ggauuuugagguuauuuguucaagaaguuagcuuccccuaacucuuacauagaccucauugaaaaucc

SEQ ID NO: 56490 - RNA, 129 nt, Homo sapiens
ggauuauuacaauucaaggugaaauguggguggggacacagcaaaacuauaucaaugauaaaauguaagugauauggcuuggcuaugucaccacccaaaucucuucuugaauuguagcuccuauaaucc

SEQ ID NO: 56491 - RNA, 59 nt, Homo sapiens
ggauuccauuagcugagauaucuugugauagggagagguaucacaguagaauaggaucu

SEQ ID NO: 56492 - RNA, 79 nt, Homo sapiens
ggauuggauuauuuggucaauaaguauuuauuuggcauuuacuuugugccaaauacuuucauguugucuuguuuaaucc

SEQ ID NO: 56493 - RNA, 66 nt, Homo sapiens
ggauuguauuaccgaaguggagucccaaauucacccauucucagacuucagugcagguaacaaucc

SEQ ID NO: 56494 - RNA, 62 nt, Homo sapiens
ggccccuggcagucugccucuucacuguagcuggcugcaaguguagagaagaguugcuggcc

SEQ ID NO: 56495 - RNA, 56 nt, Homo sapiens
ggcccucugccuuuucaugugggauggcugccuuccacuagugagggcaaagggcc

SEQ ID NO: 56496 - RNA, 102 nt, Homo sapiens
ggcccucuugaucugaggcggggagacacagggauggguaggaccauggggguugaaccuuccuugcacuccacuguucuccuggcuuccaaagaacuggcu

SEQ ID NO: 56497 - RNA, 93 nt, Homo sapiens
ggccaggcaugguggcucacgccuauaaucccaacacuuuaggaggcugagguaaguggauuaugaggucaggaguucgggaccagccuggcc

SEQ ID NO: 56498 - RNA, 94 nt, Homo sapiens
ggcaggagaauugcuugaacccaggggaggagguugcagugagcugagaucgcaccauugcacuccagccuuggggauacagcgagacucuguc

SEQ ID NO: 56499 - RNA, 76 nt, Homo sapiens
ggcaugaguucugggaagguugguucugccaaacauucauaugcguagagcacauuaucauuuccaaagcuuggcc

SEQ ID NO: 56500 - RNA, 123 nt, Homo sapiens
ggcaugcgccaccacgcccagcuaauuuuuuguacuuuuaguagagacgggauuucaccuguugaucaggcacccugucucuacuaaaaauacaaaaauuagcugggugugguggcgcaugcc

SEQ ID NO: 56501 - RNA, 111 nt, Homo sapiens
ggcaugguagcacaaaccuguaguuccagcugcucaggcaguuaaggcagaaaaaaugcuugagccuuggagugugagagcagccuggaaaacauagcaagaucccauguc

SEQ ID NO: 56502 - RNA, 71 nt, Homo sapiens
ggcagaugcugcaaucucggcacuuugggaggccaaggcaggcggcugggagguggagguuguagcgagcc

SEQ ID NO: 56503 - RNA, 69 nt, Homo sapiens
ggcaccuagaagaauuuuaguaucuuacuccccugcauuucagugagaugcuuguaaauucauuuugcc

SEQ ID NO: 56504 - RNA, 95 nt, Homo sapiens
ggcaaggggugacuccagucaagugcuuucuuggggauuuagugagguuagugacacuagccaagaauaauguacuugcuggagggaucagugcu

SEQ ID NO: 56505 - RNA, 127 nt, Homo sapiens
ggcacaaagcaaugaagacaugugagcaagcuucuuguucaugugcaugggaaucucaaguguuaccacuucauuuagaugauguuuacugagcaucaggagcaguauaugucagcaccaaugugcc

SEQ ID NO: 56506 - RNA, 90 nt, Homo sapiens
ggcacaacggaccacauauugcaugauuccauuuguguggaauggcuggaacaggcaaauccauagaugggaaacagauuagugguugcc

SEQ ID NO: 56507 - RNA, 61 nt, Homo sapiens
uugucugagauggagucuuguucugucacccaggcaguggcaagaucucagcucacugcaa

SEQ ID NO: 56508 - RNA, 96 nt, Homo sapiens
uuguaagugugcguucugggagcaucaagaccauccaagauucaggugaucccuggauggagaggcuugugaugccugggaaguguguguuaacag

SEQ ID NO: 56509 - RNA, 85 nt, Homo sapiens
uuguagccagggaccccugacucauuaggacucaagacaccuaccugguuucauagccuucuaaugaguugucgccggguugcaa

SEQ ID NO: 56510 - RNA, 84 nt, Homo sapiens
uuguagcuggugauugguuucauucaguggaagagcugcaaauaaacuaagcuaacuggguaacagccaaggccaugguuacag

SEQ ID NO: 56511 - RNA, 93 nt, Homo sapiens
uugucaucaucuagcagaacaauacaauucgguugccggggcuuuuccuuccuguccugaguugaauugugucucucccaaaagauaugauga

SEQ ID NO: 56512 - RNA, 97 nt, Homo sapiens
uugggaaagguccuugauuucugagaccaaaacuuguaacugagcuuuagauuauaaaugcucucaagaguguucaagugaguaaccccuuucucaa

SEQ ID NO: 56513 - RNA, 79 nt, Homo sapiens
uuggguugguggaaaauuauugcuguuuuugacauuacuuuuaauggcaaaaaccgcaauaacuuuuacaccaaccuaa

SEQ ID NO: 56514 - RNA, 94 nt, Homo sapiens
uugguaucagcaugauacuggcuucauagaaugauuuagggaggauucccucuuucucuauccuguggaauagugucaacaggauugauaccag

SEQ ID NO: 56515 - RNA, 60 nt, Homo sapiens
uuggucaggcuaaucucgaacguccaacgucaggaauguccggugauucgccugcaucag

SEQ ID NO: 56516 - RNA, 56 nt, Homo sapiens
uuggucaucucccuccuuuuagcuuaaaccgaagcaugaugggggagauaggccga

SEQ ID NO: 56517 - RNA, 60 nt, Homo sapiens
uugguccucccaugcucaagagacucucuuugccucagccuccugaguaacugggaccaa

SEQ ID NO: 56518 - RNA, 58 nt, Homo sapiens
uuuaacauuggaugagaucgucuaagugaacuaguccagugucccauccgauguugaa

SEQ ID NO: 56519 - RNA, 67 nt, Homo sapiens
uuuaaggcaugccuguacaugcucauacauuuuucuaaauauaaucuuaugugcaggaugcccugag

SEQ ID NO: 56520 - RNA, 80 nt, Homo sapiens
uuuaaugugaagugaagacucacagaaggccuggacagcugccugguccuuccugagucuuugaagcuuccaucauugaa

SEQ ID NO: 56521 - RNA, 72 nt, Homo sapiens
uuuaccaggcugggacaauuucuaaacacaguaaucauauuaaucauggcaagauuguuccgguuugguaga

SEQ ID NO: 56522 - RNA, 106 nt, Homo sapiens
uuuaccugauuacguugucugauguuaacagcacuacguggggauccaggauuucacuuggauaccaugcagcaugcuuuagagucagagagguggaacuggugaa

SEQ ID NO: 56523 - RNA, 86 nt, Homo sapiens
uuuagauaccucacguaaguggaauaauacaguauuuauucuucugugucuggcuuaucucacuuaccauguguccucuaucuagg

SEQ ID NO: 56524 - RNA, 113 nt, Homo sapiens
uuuagauggacuacagugaaaagaaaucacuagguaguaaucugcagagaaagccauucucuuuuauccuaucuuugcauuuccucuuaguuucugcacuaguuauaucuaga

SEQ ID NO: 56525 - RNA, 62 nt, Homo sapiens
uuuauagcagugaguauugacuaauacagaaaauugguaucagaaaugggcauugcuauaaa

SEQ ID NO: 56526 - RNA, 72 nt, Homo sapiens
uuuauauguaccuguuuaaaaaagugaguguacacucaaauuauuuaauuuuuggauaaugguacauguaag

SEQ ID NO: 56527 - RNA, 80 nt, Homo sapiens
uuuaucaagaaaagagguuuaauugauucacaguuccaaggagcuggggagacgucaguaaacuuaacaaucaugguaga

SEQ ID NO: 56528 - RNA, 81 nt, Homo sapiens
uuuaucaugugauaacauuucuucugguacacuugcacauaagaaagcuguauagaugaaaagauguugcaauuggaugaa

SEQ ID NO: 56529 - RNA, 87 nt, Homo sapiens
uuuaucugccugucauuuuguuuucauuauccaugauagcaaucucuugcauggcuuaugagaacauaucaagugauugguuuuaaa

SEQ ID NO: 56530 - RNA, 63 nt, Homo sapiens
uuuauuguguacuacaguaugccacacuguuaaauauugggcauguagaagugacaugaugaa

SEQ ID NO: 56531 - RNA, 76 nt, Homo sapiens
uugugaaagcucaggaaucaagauauucuuccuucgaaauacuuagauaugucuuaguuaccuugggcugccauaa

SEQ ID NO: 56532 - RNA, 62 nt, Homo sapiens
uugugaauggugccgcgauaaacauacgugugcauauguguuuauagcagcaugauuuauaa

SEQ ID NO: 56533 - RNA, 78 nt, Homo sapiens
uugugauuauuaagugcuugcagaaguccaugaccucgguguuauaggcuucuaaagugcaaguacuauacuucauaa

SEQ ID NO: 56534 - RNA, 60 nt, Homo sapiens
uugugcaugaugcauacauggucgcccaguuaaggugaccacaaucuuauauuaucacaa

SEQ ID NO: 56535 - RNA, 71 nt, Homo sapiens
uugugucuuacugaguugauugucuuagaaacauauaaacaugacuaugagaccagcuucagaaagcacga

SEQ ID NO: 56536 - RNA, 78 nt, Homo sapiens
uuguguuaagcuauauugaggaugccauucaauaauuacuuuaaaaugcauggcgacuucaaauaugaaggaacacaa

SEQ ID NO: 56537 - RNA, 74 nt, Homo sapiens
uuguguuuaaggaguagaauagaugcaccuucauucagaaaguggaaguuuaugaagucuaagccaaaacacaa

SEQ ID NO: 56538 - RNA, 77 nt, Homo sapiens
uuguuaaaaucauauucuuguucuguuccaaaucuugaauaacugaggcuuggaauaucaugagaguuuguuaacaa

SEQ ID NO: 56539 - RNA, 65 nt, Homo sapiens
uuucacuagggagaaacugaggcuuaggggccaccaugaucgagucucagccuuccuggcagaaa

SEQ ID NO: 56540 - RNA, 124 nt, Homo sapiens
uuguuuauaaauuacccaggcucagguaucuucauuauagcagugugaaaauggacuaauauagagaauugguacugguagagagaggcauugcuauaaggauaaccugaaaauguggaagcaa

SEQ ID NO: 56541 - RNA, 58 nt, Homo sapiens
uuuaaagcuccaagcaugucuggcauauaguaugcaaccaguaagugcuaguuuuaaa

SEQ ID NO: 56542 - RNA, 91 nt, Homo sapiens
uuguggauauugaaguuugaagccuguuguucaucuauagaugcacuggaugggauuggaagucuucagauuucaguaggguuuuccacaa

SEQ ID NO: 56543 - RNA, 73 nt, Homo sapiens
uuguuccacaaauauuucuugagcaccugguauuugcccagcacugugcuaggugcuaggaagauaggaauaa

SEQ ID NO: 56544 - RNA, 74 nt, Homo sapiens
uuguuccuucaguuauccagugaaagacaaauggauucagggaucccuguaaaucugguuaauuggauaaauaa

SEQ ID NO: 56545 - RNA, 58 nt, Homo sapiens
uuugcuauagugaauagugcugcagugaacauaugcgugcaugggucuuugugguaga

SEQ ID NO: 56546 - RNA, 58 nt, Homo sapiens
uuugcuauugugaauagugccgcaauaaacuuacgugugcauaugucuuuauagcaga

SEQ ID NO: 56547 - RNA, 69 nt, Homo sapiens
uuugcuguuugguuggcuuagccauuccagccuuugggcuuuggaaaguccaagccaaccgggggcaga

SEQ ID NO: 56548 - RNA, 98 nt, Homo sapiens
uuuggauuggcauuucucugaugaucaaugaaguugagcaccuuuucauaugccugucugccauuuguaugucuucuuuagagaaaugucuauucaaa

SEQ ID NO: 56549 - RNA, 57 nt, Homo sapiens
uuuggcuuugagaagcaguggagcuggggcaucagaauccagugaggcaaaguggga

SEQ ID NO: 56550 - RNA, 129 nt, Homo sapiens
uuuggggauguguacuuuuuuguccuccauccuucuucacaugugcguuuuggcauguguuauaacuuggcacuaaaaugcacaugugaagaaggaaggaggacagaaaaaagaguacccauccccaaa

SEQ ID NO: 56551 - RNA, 89 nt, Homo sapiens
uuuggggcuaaaaacuuccuuguuuuguuauuguaucauauuggagcucacauauuuugaugagaggugauaaagcaaggguccccaga

SEQ ID NO: 56552 - RNA, 65 nt, Homo sapiens
uuugguaguuuguugggacccaugggugggcaugggaagcugacauuuccaaaggaacuaccaag

SEQ ID NO: 56553 - RNA, 57 nt, Homo sapiens
uuuguaacaugcuuucacuucaguuaaagcagaaacugaugugauauaugugacaga

SEQ ID NO: 56554 - RNA, 59 nt, Homo sapiens
uuucauaguaacaguaacuaugguagguaacuuauuuauaguguuccuuuacuaugaaa

SEQ ID NO: 56555 - RNA, 57 nt, Homo sapiens
uuucauaguuugcauagggcauuugcauagggcaaaugcuuuaguacagacuuggaa

SEQ ID NO: 56556 - RNA, 59 nt, Homo sapiens
uuuccacuuuguuauggggauauauguauuauuauuuaucucaaugcacagagaggaaa

SEQ ID NO: 56557 - RNA, 70 nt, Homo sapiens
uuucccagaagcagagccugaggcagggauucagaugcucaugaacuguuugaggguuugcuuucagaag

SEQ ID NO: 56558 - RNA, 55 nt, Homo sapiens
uuucccugaaggcucugaagucccauacgggaaaccaugagggccuuccgggaag

SEQ ID NO: 56559 - RNA, 129 nt, Homo sapiens
uuucccuugggauauuauaacauaaccugcuuguaaauuugagauuaaucuuuaaguaagaucugucuguaaaucaaaccacaccaguguuacuaagaugaguuucuugcagguuuguccuaggagaga

SEQ ID NO: 56560 - RNA, 64 nt, Homo sapiens
uuucccuuucugccuugaaucuuucaugccuccaggucaaaagagagagacagagacagggaaa

SEQ ID NO: 56561 - RNA, 64 nt, Homo sapiens
uuucuacagggcuugccagguaacacuuuccucucacguucuacucaagggcucucuguggaaa

SEQ ID NO: 56562 - RNA, 72 nt, Homo sapiens
uuucucuucucuagugauuagcaccucauguguaaaacgcaaugaguaugagaauacauuaagagaaagaaa

SEQ ID NO: 56563 - RNA, 58 nt, Homo sapiens
uuucugugaggauuuuaacaugagagucugcucaucacacgugaacucaucacagaga

SEQ ID NO: 56564 - RNA, 71 nt, Homo sapiens
uuucuuaaaagucauugaaaaauguauagcuagaguuaugucucuaugugcaaauuaauugcuagaagaaa

SEQ ID NO: 56565 - RNA, 65 nt, Homo sapiens
uuucuuuguuguuguagcuggagacaauuagguaacacaaauugucacccuacauaacagggaaa

SEQ ID NO: 56566 - RNA, 84 nt, Homo sapiens
uuugagaccagguuaugaaacuggcuaauuuuuguauuuuuguuaaauaccgaaauucacuguguugccaaggcuggucucgaa

SEQ ID NO: 56567 - RNA, 65 nt, Homo sapiens
uuugagaugcauacucaaauuaaguauauuuauuugaaaugcauauguugagaugcauauucaaa

SEQ ID NO: 56568 - RNA, 57 nt, Homo sapiens
uuugauguugagacuauaaagcuacaguaaucagcacagugugguauuggcaucaaa

SEQ ID NO: 56569 - RNA, 80 nt, Homo sapiens
uuugauuucuucuaauacacgguaugacuuugcucguuuuucauacaaguagacacugaaauguauugaagaguauuaaa

SEQ ID NO: 56570 - RNA, 56 nt, Homo sapiens
uuugcacauugauuuuguaucuugagacuuugcugaaguugcuuaucagugucaga

SEQ ID NO: 56571 - RNA, 57 nt, Homo sapiens
uuugcagagucuuucgcugggcugucuccccaucagcaagagaaagagcucuccaaa

SEQ ID NO: 56572 - RNA, 66 nt, Homo sapiens
uugccauguguguaaggugcugugaacugugagugcugaagauucgcagcauucaauaccaggcag

SEQ ID NO: 56573 - RNA, 67 nt, Homo sapiens
uugccauuccucguguucaggacaaaaugacauuccaggaauggaaucugaaccaugggaauggugg

SEQ ID NO: 56574 - RNA, 64 nt, Homo sapiens
uugcccuauauccagauucugucuacuaaauccacccccacuggccuguuuggguacuggguaa

SEQ ID NO: 56575 - RNA, 58 nt, Homo sapiens
uugcaaugugaugugauuuggauuuguguccccacccaaaucucacaucccauuguaa

SEQ ID NO: 56576 - RNA, 87 nt, Homo sapiens
uugcacaauuccaggaggcagcauucgcauagacagccuaccugugaucagccugggaugugacuguugcccccaugaguuaugcaa

SEQ ID NO: 56577 - RNA, 86 nt, Homo sapiens
uugcaggugggaagcaguuucucauaugaagugacccaguaagaaugugccucugccuucaaagugagcuccuucucacucugcaa

SEQ ID NO: 56578 - RNA, 84 nt, Homo sapiens
uugcauagauaucuggauaggaguaaaacauggacuuagaagaauguggcuucaaagucuauucuacccuuaccagcuguguga

SEQ ID NO: 56579 - RNA, 91 nt, Homo sapiens
uucuucccacagacauugauugaacaucuguucuuguaucccuccaugaagcuuggcacaaagcagguguccacaauguuugcugaaugaa

SEQ ID NO: 56580 - RNA, 130 nt, Homo sapiens
uucuuccuuuccaguugguaugccuuuuauuucuucuucuugccuuauugaagugacuaagacucccaauacuguguugaauaagaguaguaagggcagauauucuugcuuuguucugaccccuggaaga

SEQ ID NO: 56581 - RNA, 76 nt, Homo sapiens
uugagguaauaaacagccauuccuguuggauaaccccagagagugagacuuggcugcauaucccuaccugccucaa

SEQ ID NO: 56582 - RNA, 103 nt, Homo sapiens
uugagguggagucucacucugucacccaggcuggagugcaauggcguggucucggcucauugcaaucucugccucccagguucaagugauucuucggccucag

SEQ ID NO: 56583 - RNA, 58 nt, Homo sapiens
uugaguuugaguauucuaaagcugguucauaaaguugcuuuaguguaaucuuauucaa

SEQ ID NO: 56584 - RNA, 56 nt, Homo sapiens
uugauagaucagggauuugauuuuuuaaaagagagaaucuaacaccuuucuaucag

SEQ ID NO: 56585 - RNA, 61 nt, Homo sapiens
uugauauguuguuagauucaguuagcuaguauuuuguuaaggauucuagcaucuaugucaa

SEQ ID NO: 56586 - RNA, 101 nt, Homo sapiens
uugaucauuuagucagugagaaugcaugaaagacuuacauauuuuggugacuuauuucauuucuauuuguaagucuuugugcuucuaucuauaauaaucag

SEQ ID NO: 56587 - RNA, 73 nt, Homo sapiens
uugacuucagagcugauucaagccuuggaguaauuucaucccuccuuacucacuugaaucuaguggaagucaa

SEQ ID NO: 56588 - RNA, 103 nt, Homo sapiens
uugagacagagucuagcugugucacccaggcuggagugcaguggcgcaaucuuggcucacugcgacguccgccucccggguucaagcaauucuccuguuucag

SEQ ID NO: 56589 - RNA, 103 nt, Homo sapiens
uugagacggagucucgcucuguugccuaggcuggagugcaguggcacgaucucggcucacugcaaccucugccucccagguucaagagauucuccugccucag

SEQ ID NO: 56590 - RNA, 60 nt, Homo sapiens
uugagacggagucuugcucuguugcgcaggcuggagugcaauggcgugaucuccgcucaa

SEQ ID NO: 56591 - RNA, 55 nt, Homo sapiens
uugagacggagucuugcucuuuugcccaggcuggagugcaauggcucagucucag

SEQ ID NO: 56592 - RNA, 56 nt, Homo sapiens
uugagacggaguuuugcucuuguugcccaggcuggagugcaauggcuccaucucag

SEQ ID NO: 56593 - RNA, 56 nt, Homo sapiens
uugagacugaguuucacucuuguugcccaggcuggaguguaaugacucgaucucgg

SEQ ID NO: 56594 - RNA, 55 nt, Homo sapiens
uugagaucaugcuacugcacuccagcuugggugacagaguaagaccuggucucaa

SEQ ID NO: 56595 - RNA, 55 nt, Homo sapiens
uugagauggaaucuugcucugucuccuaggcuagagugcaauggugccaucucgg

SEQ ID NO: 56596 - RNA, 56 nt, Homo sapiens
uugagauggaguuucaauauugucacucaggcuggagugcaauggcucuaucucgg

SEQ ID NO: 56597 - RNA, 56 nt, Homo sapiens
uugagauuggagucucgcucugucguccaagcuggaguguauuggcacgaucucag

SEQ ID NO: 56598 - RNA, 70 nt, Homo sapiens
uugagauugggacagacagggagagugagauugggaaggagccacguucgguccccuuggcugcccucgg

SEQ ID NO: 56599 - RNA, 100 nt, Homo sapiens
uugagcagcaccgugccugcuagcccaagugcucuaggauccugagucaucucacgaugacacaggaagucagcacugauggcuggaggcgugcuuucga

SEQ ID NO: 56600 - RNA, 104 nt, Homo sapiens
uugagccaggagucuuguucugucauccaggcuagagugcaguggugugaucucagcucacugcgaccucugccucccggguucaagcgauucuccugccucag

SEQ ID NO: 56601 - RNA, 67 nt, Homo sapiens
uugagccuaugugugucuuugcauugugagaugggucuccucaauacagcacacagaugggucuuga

SEQ ID NO: 56602 - RNA, 104 nt, Homo sapiens
uugaggcaggagaaucgcuugaacccgggaggcggagguugcagugagccgagaucgugccauugcacuccagccuagccaacaagagcgaaacuccgucucaa

SEQ ID NO: 56603 - RNA, 121 nt, Homo sapiens
uuggcuuccuuuugcuuguguuacaagaggaccuuugggggcauauuagcuugcuuguuaagaccaaugaguaaaucacuaauggcuuccggccacuuugcauacauccaagaauaguuga

SEQ ID NO: 56604 - RNA, 55 nt, Homo sapiens
uuggcuuggagaguugaaauguuaauuugaugugcacaucuauucuuaaagccaa

SEQ ID NO: 56605 - RNA, 71 nt, Homo sapiens
uuggacccucaguggauuagauaaugcacccccaccuugaggagggcaaucuacuucacugacucuaccaa

SEQ ID NO: 56606 - RNA, 56 nt, Homo sapiens
uuggagagagaggacucccggcccuacccaggccucgugggaguuucugucuccaa

SEQ ID NO: 56607 - RNA, 64 nt, Homo sapiens
uuggcagaugagccgcgcuccaagaaccagcuguugaacguuugugagugcaggcuggugccag

SEQ ID NO: 56608 - RNA, 56 nt, Homo sapiens
uuggccagugucuuuuuuuccugucauauauuuaggaagauugagauaaugacuaa

SEQ ID NO: 56609 - RNA, 60 nt, Homo sapiens
uugcugagucuuucuagguugcuguugauguaagcaguggccaggcugagagcuuagcag

SEQ ID NO: 56610 - RNA, 82 nt, Homo sapiens
uugcugcacugagaugagagaaugcuugccugagauguguaguucugucggggguaucuuuuucucuucaucagccaaguaa

SEQ ID NO: 56611 - RNA, 73 nt, Homo sapiens
uuggaauuaaaauggguaauuggcaaauagaaaguauugaaaccaauuuucacagcaauugccuauuguccaa

SEQ ID NO: 56612 - RNA, 68 nt, Homo sapiens
uuggauaucauuggccauguuucaaucgaauggagccacugggccccaacacuggcuuugagauuuag

SEQ ID NO: 56613 - RNA, 103 nt, Homo sapiens
uuggcaaaugaaugagucauccugagccucuguccucacaucuguaagagggagcccuaauaguagguguugguagagguuucguggcaaccucgugagcuga

SEQ ID NO: 56614 - RNA, 87 nt, Homo sapiens
uuggcaagaucaauguaaguggauuucaaauuccauaaggaacugauuugguggagaacauucauuugcaagaguagauuuagcuaa

SEQ ID NO: 56615 - RNA, 60 nt, Homo sapiens
uuggcaaguccccaccucucucuuucaguccauguguugggggaggucagggcuggccaa

SEQ ID NO: 56616 - RNA, 63 nt, Homo sapiens
uugauucguguauauucaaccuugcauccuagggaugaagcuaacuugauugugauggaucaa

SEQ ID NO: 56617 - RNA, 116 nt, Homo sapiens
uugccuccagauggcuuuaggggccaugcagagggcagugguagguaugagggagccagcggaggcuucuuuggaggcgaucuguuugaugugauacggucuguggauggaggcag

SEQ ID NO: 56618 - RNA, 82 nt, Homo sapiens
uugccuucagggaauguuauuuaauagcauauuugugaucuucuagccuguugugccaaaaaauagcauucccucaaagcag

SEQ ID NO: 56619 - RNA, 92 nt, Homo sapiens
uugccuuucuaauuaugacaauuguuuucuuguguagguauuaucaaaaccaguaccacugccgagaaaacagaugaagaggagaaagguaa

SEQ ID NO: 56620 - RNA, 69 nt, Homo sapiens
uugcuaaugaaguuucaggcaccauugucauugauaacaucuuaucaggagacaggguuuugagagcaa

SEQ ID NO: 56621 - RNA, 73 nt, Homo sapiens
uugcuauguaauuguguauauuucaguuuguauacuucauaucuccaugaaauugcacauuccuugcuggcag

SEQ ID NO: 56622 - RNA, 77 nt, Homo sapiens
uugcucuguugccuaggcuggagugcaguggcaugaucucagcucacugcaaccuccaccucccagguucuaaguaa

SEQ ID NO: 56623 - RNA, 77 nt, Homo sapiens
uugcuugaacccaggaggcagagguugcagugagccgagaucacgcuguugcacuccagccugggugacaagagcaa

SEQ ID NO: 56624 - RNA, 76 nt, Homo sapiens
uugcuugaacccaggaggcggagguugcagugagccaagaucgugccacugcacuccacccuuggcagcagagcga

SEQ ID NO: 56625 - RNA, 70 nt, Homo sapiens
uugcuugaacccaggagguugcagugagccgagaucguguuauugcacuccagccuggguaacagagcaa

SEQ ID NO: 56626 - RNA, 68 nt, Homo sapiens
uugcuugaagcugcgaggcggaggcugcagugagacgagauugcgccauugcacuccagccuggguaa

SEQ ID NO: 56627 - RNA, 76 nt, Homo sapiens
uugcuugaauccgggaggcagagguugcagugagcugagauugcgccacugcacucuagccuuggcaacagagcaa

SEQ ID NO: 56628 - RNA, 68 nt, Homo sapiens
uugcuugagccggggaggcagagguugcagugaccagagauugugccacugcacucuggccugggcaa

SEQ ID NO: 56629 - RNA, 68 nt, Homo sapiens
uugcuugagccuggaaggcagagguugcagugaaccgagauugcgccauugcauuccagccugggcaa

SEQ ID NO: 56630 - RNA, 64 nt, Homo sapiens
uugcuuuguuacugcaguuuccacucuuucagcuccagcugggcugacugcagcugcagggcag

SEQ ID NO: 56631 - RNA, 94 nt, Homo sapiens
uugcuuuuaagaaaaugcuuucuuggaccauuuggauuacagccuuuccacuaggcugcaaauauucauaaagguauucauuccuaaaagacaa

SEQ ID NO: 56632 - RNA, 64 nt, Homo sapiens
uugcuuuuugcuauuuugagucuauucugcagcauagagguauaccaaaaaggcaucugagcag

SEQ ID NO: 56633 - RNA, 58 nt, Homo sapiens
uuugcgcuuuuccuauguugcccuggagagcagaucuagggagcguggaaggugcaga

SEQ ID NO: 56634 - RNA, 120 nt, Homo sapiens
uuuuuuuuuuuugagauggagucuuacuuugucacccaggcuggagugcagugagccaagauugcaccauugcacuccagccuggcaacaagagcgaaacuccaucucgggaaaaaaaaa

SEQ ID NO: 56635 - RNA, 63 nt, Homo sapiens
uuuuuuaguuagcugggcaugauggcucauacccacagccugcagucccagcuacuuaggagg

SEQ ID NO: 56636 - RNA, 93 nt, Homo sapiens
uuuuuucaauuuuauuuuagauuugggguacaugcacagguuugcuaccuggcauauugcaugaugcugagauuugggauaugaaugaaagga

SEQ ID NO: 56637 - RNA, 95 nt, Homo sapiens
uuuuuucucccauucaugcugucagaaauuuauuaaaaagcaaaugaagugugauaauaguuuuuaagugaauuugacagguaaugaagaaaaaa

SEQ ID NO: 56638 - RNA, 65 nt, Homo sapiens
uuuuuuguagagacaggaucucacuauguugcccaggcugguuuugaaccccugcucucaagaaa

SEQ ID NO: 56639 - RNA, 69 nt, Homo sapiens
uuuuuuucugguuguguaauuuuaaauagaaccccagggguuugcuuugagaaugcuaccagagaagag

SEQ ID NO: 56640 - RNA, 67 nt, Homo sapiens
uuuucuccuguuaaucugucuuuuguuauugaggguuuagccauaaaccuagcaauggaugaggaaa

SEQ ID NO: 56641 - RNA, 78 nt, Homo sapiens
uuuucuugggugaguuugugaauaaauuaaguugcuuuuuaaucuguugcuuuuaauugcaaauacaucccaggagaa

SEQ ID NO: 56642 - RNA, 58 nt, Homo sapiens
uuuugaaagacaucaccuacugcucaauaccugguugaggcagauugucucuucagaa

SEQ ID NO: 56643 - RNA, 82 nt, Homo sapiens
uuuugaaauguuuuguucuugaguugggaguacaaaguguccagcacuugguauucuuauccaggaaugagcauuuacaaaa

SEQ ID NO: 56644 - RNA, 57 nt, Homo sapiens
uuuugaggaacuuuauucuuaucuauauccaggauacacugugagguauccucaaaa

SEQ ID NO: 56645 - RNA, 77 nt, Homo sapiens
uuuuguuuuauagguccugugagauguaugcauuaaagagguucuguuuugauguguuuccaggauuuguuucaaga

SEQ ID NO: 56646 - RNA, 60 nt, Homo sapiens
uuuuucaccugugaacugggacaucaguaaugaugggcucacuagaucaagggagagaaa

SEQ ID NO: 56647 - RNA, 79 nt, Homo sapiens
uuuuuccauagauagauagguagcaucauugauuugaaauaaauuaaauugcauugagcugcuuauuaauccagagaaa

SEQ ID NO: 56648 - RNA, 59 nt, Homo sapiens
uuuuugaggggauccaaguguucuaaaauugauuguagugacauagagacucucaaaaa

SEQ ID NO: 56649 - RNA, 107 nt, Homo sapiens
uuuuugauuguccauacuuaggcugccgcuaugcauguauaguggguagaagccagggaugcuucuaaacaucuuacaaugcauaggguagucuccugcaacaaaga

SEQ ID NO: 56650 - RNA, 77 nt, Homo sapiens
uuuuggaaagagguguuuaugacuuuuaguuggagugauguagaaacuguacaguuguaaacauauuuuuuucaaaa

SEQ ID NO: 56651 - RNA, 78 nt, Homo sapiens
uuuuggcuauuguuaacagugcuguuauaaauguacaugugcauguauuuguuugaguacuuguuuucauuucuagaa

SEQ ID NO: 56652 - RNA, 91 nt, Homo sapiens
uuuuggguaucuucuuagcagcaccccacucuacugguaccaauuuacuguauuagucuguuuucaugugcugaugaagauauacccgaga

SEQ ID NO: 56653 - RNA, 83 nt, Homo sapiens
uuuugguaaugauacauaagacauuuaaaaauugauaauauauaguguuggcaauugcuaugauuugaaugugucucccaaaa

SEQ ID NO: 56654 - RNA, 129 nt, Homo sapiens
uuuugguuaaauauugauaacuuugcacagcagaaugcagaauguucauuuuguggguagauagcagacaacuaacagguagagugaagcuuuuuauauucugugaaagugcagaagucauauaucaua

SEQ ID NO: 56655 - RNA, 77 nt, Homo sapiens
uuuuguauaguaguacaaaaguuuuucuacagcccuuuuaauggcugcaugaaaugccuuugugugacuguacuaaa

SEQ ID NO: 56656 - RNA, 110 nt, Homo sapiens
uuuuguauauggugguguuuggaagaagguauuuguaauauaugucauugaugugaaaauggcagauaggauacaggacuaacuugcagcucccacuuggauggacagaa

SEQ ID NO: 56657 - RNA, 61 nt, Homo sapiens
uuuguccucagcaccugggaagcaucaggaauacaccagcuucucagaggcaggggauaaa

SEQ ID NO: 56658 - RNA, 109 nt, Homo sapiens
uuuguuuugcacugcuucacucuacaaccuguuggggugaaucauacuuuguuauuaauugcucugaggcacucccuagcgggguggagcauuuggaguccugaauaaa

SEQ ID NO: 56659 - RNA, 74 nt, Homo sapiens
uuuuaaguuaagaaguguaacuuaaguuuaacuuuuuuuuaaguguaacuuaaguguaacuuuuuaaguuaaga

SEQ ID NO: 56660 - RNA, 83 nt, Homo sapiens
uuuuagacaagaaauuucaauauuauuuucagguccugguauacguggugaugaaaguuauauugugaaauucaauucuggaa

SEQ ID NO: 56661 - RNA, 59 nt, Homo sapiens
uuuuaguuacugcaguagcaaagagauucaugaguuuagccuauugcacauagcugaag

SEQ ID NO: 56662 - RNA, 72 nt, Homo sapiens
uuuuauaagauuacuauaaugugcagcuuauaacugcaaaaugugagaucugucuuuauaguauuuaugaag

SEQ ID NO: 56663 - RNA, 67 nt, Homo sapiens
uuuucagcagugugaaaacaaacuaauacaguaaauugguacuaguagagugggacguugcugaaaa

SEQ ID NO: 56664 - RNA, 85 nt, Homo sapiens
uuuuccaagaauuagccagaaauuccaugucacccauucuggucaguaggauggaagaaacgauuuucuggaaguuucuggaaaa

SEQ ID NO: 56665 - RNA, 89 nt, Homo sapiens
uuuuccacagcagcuugucaagagcuuuaucuuuucucccaucuguuuggauuggauacuuaacagcucuacagcugcucuuuggagga

SEQ ID NO: 56666 - RNA, 59 nt, Homo sapiens
uuuuccagugggacucccauuaucacuauguugauauucuugauggugucccaugaaaa

SEQ ID NO: 56667 - RNA, 58 nt, Homo sapiens
uuuuccauuuacuugugcugucucuguacacagcuaggcauuguacaguaauggaaaa

SEQ ID NO: 56668 - RNA, 78 nt, Homo sapiens
aaaaaaaauuuagauauauauauaaugggggaaucauaaacguguggaagucuucauuauguauaguaaguuauuuuu

SEQ ID NO: 56669 - RNA, 71 nt, Mycobacterium avium subsp. paratuberculosis
uuggcaccaaccuccgccccguuggcaccaaccuccgccccguuggcaccaagaaguggggggugugucaa

SEQ ID NO: 56670 - RNA, 124 nt, Mycobacterium avium subsp. paratuberculosis
uuucagggcggcgacccgcaguaacugaacggucagguugguggcucccaguaucgggaacaacccgauguagaugcgcagcgaucugaccccgugcaguucgagggugcugaacacgaugaag

SEQ ID NO: 56671 - RNA, 77 nt, Mycobacterium avium subsp. paratuberculosis
uuggggguguuaugagagucucaugggcaucaucggucacauggguaccgguuugccuaccaugagaucacucccaa

SEQ ID NO: 56672 - RNA, 58 nt, Mycobacterium avium subsp. paratuberculosis
uuguccgaucgaaccauagucucccgcccacaggcggugcaaggggcgaucgcggcaa

SEQ ID NO: 56673 - RNA, 103 nt, Mycobacterium avium subsp. paratuberculosis
ggcacucgucguggcggugcucuuggugguggucgucgacgagcccgccggcggguuggccgucgaacugcagccggccaacagcagcgccgcggccggugcc

SEQ ID NO: 56674 - RNA, 59 nt, Mycobacterium avium subsp. paratuberculosis
ggcaucaggaaagucuugagccccaaugcuuucagcucguccagggucuuucuggugcc

SEQ ID NO: 56675 - RNA, 80 nt, Mycobacterium avium subsp. paratuberculosis
ggcagggacgcgcucgucggccggugcgccccggggccgaacccgccguggccuugccgccggaugaucgccgccccgcc

SEQ ID NO: 56676 - RNA, 76 nt, Mycobacterium avium subsp. paratuberculosis
ggcagccgaccccguaucgcuggcugccgccgcgguguucagugaacguggcagccagcauucggccgcggcgacc

SEQ ID NO: 56677 - RNA, 78 nt, Mycobacterium avium subsp. paratuberculosis
ggcccaacgacccggcgaccaaggccgcccugcaggugcugaccgcgcugcggcccgaggucgagggucaggugggcc

SEQ ID NO: 56678 - RNA, 64 nt, Mycobacterium avium subsp. paratuberculosis
ggccaccgcugcgggcccgcuggucggagggacccuucuucgccuugggcucccaguggucgcc

SEQ ID NO: 56679 - RNA, 55 nt, Mycobacterium avium subsp. paratuberculosis
ggccagcacgguguugacgguggacaggauguagucgaugucggccuugguggcc

SEQ ID NO: 56680 - RNA, 58 nt, Mycobacterium avium subsp. paratuberculosis
ggccagcagggugggguuacgguagguguugccggugaccagggugcccagcuggacc

SEQ ID NO: 56681 - RNA, 64 nt, Mycobacterium avium subsp. paratuberculosis
ggcccguuccagcucggcgagcgugcgggcgucgacggccgccuggucgccgaguuggcgugcc

SEQ ID NO: 56682 - RNA, 60 nt, Mycobacterium avium subsp. paratuberculosis
ggcccguugagccgcaccaucaaacgcaucaucgacccguugguguugcggcugcggucc

SEQ ID NO: 56683 - RNA, 76 nt, Mycobacterium avium subsp. paratuberculosis
ggcccgcggcgaucccacccagguacgagccgaugaaccggagugugaccuccggugggcugaucgccggcgcgcc

SEQ ID NO: 56684 - RNA, 121 nt, Mycobacterium avium subsp. paratuberculosis
ggccgaaguccugggcgaucuggccgaucaggaucaggugcucgggcuugaugucgccgccgggcacccagggcaccaccgaguagcugccguucuuuuggauguuggccaggaagugguc

SEQ ID NO: 56685 - RNA, 75 nt, Mycobacterium avium subsp. paratuberculosis
ggccgacgggugcuuggucacccugaccucaccgaggacguccugggugcgggugcccagcaccgugacgcgguc

SEQ ID NO: 56686 - RNA, 80 nt, Mycobacterium avium subsp. paratuberculosis
ggauuuccagcaacgccuugagacaggacacgucggcggucagcagaaugccuugugccagcgucucggcgucgguuucc

SEQ ID NO: 56687 - RNA, 65 nt, Mycobacterium avium subsp. paratuberculosis
ggaucugggcccgcugcuggcgcgggacaaggcguucgcccagcagcugcaggccgacagcaucc

SEQ ID NO: 56688 - RNA, 83 nt, Mycobacterium avium subsp. paratuberculosis
ggauggucaccggcccgaucugcgcggaguugugcacgugcgugccgccgcagagcuccagcgagaacgggccgccgaucucc

SEQ ID NO: 56689 - RNA, 59 nt, Mycobacterium avium subsp. paratuberculosis
ggagcccggagaccauguucgccgagcagaacaagcugcuggcccccguguucuccucc

SEQ ID NO: 56690 - RNA, 76 nt, Mycobacterium avium subsp. paratuberculosis
ggcggccccagccgagcgugcaccggcagcugcacccagcucuugcagccggcguaguccggcgugcgggccagcc

SEQ ID NO: 56691 - RNA, 55 nt, Mycobacterium avium subsp. paratuberculosis
ggcggcgaucuguucggccgagguguccuccacgcccugggccaaaaaucgcacc

SEQ ID NO: 56692 - RNA, 69 nt, Mycobacterium avium subsp. paratuberculosis
ggcggcgcaugccucacucucgcaacggucuugaacgcugcgggcgagaccgcgggagcgcgcgccgcc

SEQ ID NO: 56693 - RNA, 76 nt, Mycobacterium avium subsp. paratuberculosis
ggcggcgccggcgaucacgguggacugcggugaggccaccacugccaccacaacaucgcugauuccgcgugccguc

SEQ ID NO: 56694 - RNA, 81 nt, Mycobacterium avium subsp. paratuberculosis
ggcgcgcggccggcccgcagggggugggcgcgcaucgcgacgccggugugcucacgcugcugcuggccgagccgggcagcc

SEQ ID NO: 56695 - RNA, 75 nt, Mycobacterium avium subsp. paratuberculosis
ggcgcggggguugagcccggccgagguggucgacguccggaccggccuggccgacaccaaccccgaaguggcgcc

SEQ ID NO: 56696 - RNA, 93 nt, Mycobacterium avium subsp. paratuberculosis
ggcgccgagugcgggccgaucgccuaucccgccgucaccaaacccccggugggcuggauaacacaggacgacggccgggugacgcugggcgcc

SEQ ID NO: 56697 - RNA, 103 nt, Mycobacterium avium subsp. paratuberculosis
ggcgcgaucggccaccgcgcgcaucuggaccgccucguagccgcccuuggaggcgaucgccaugguggcguccaggaugcguuugcggcguucccgcugcgcc

SEQ ID NO: 56698 - RNA, 73 nt, Mycobacterium avium subsp. paratuberculosis
ggcgcgcaggcuggcaucgucggcgccggcgcgcaacagcgucucgacggcgccgacgaugcugucgcggguc

SEQ ID NO: 56699 - RNA, 89 nt, Mycobacterium avium subsp. paratuberculosis
ggcgcccagcgcgauggcgugccgggucugccgguagucggcauucguaugcccaacugccacaacgacucccgcguccgcgaaacgcc

SEQ ID NO: 56700 - RNA, 109 nt, Mycobacterium avium subsp. paratuberculosis
ggcgcagcgcaauucggcaaggagaacaucgcggucaucgcgaccgcggugguguacggcgugguggcgcuggucgcggugcuggucgccucccgguggcugcugcgcu

SEQ ID NO: 56701 - RNA, 107 nt, Mycobacterium avium subsp. paratuberculosis
ggccggcggcggccaguuccugacgccaguucuccgcgccgaucaccacguggaagaugucggugcgcgggaagcugucguagcgggugcgagcggcauggccggcc

SEQ ID NO: 56702 - RNA, 84 nt, Mycobacterium avium subsp. paratuberculosis
ggccggcugguggccgagccgucggccaccaccgcgaacuucgucgguggcugcagcucggccugcguggucaccagcacgguc

SEQ ID NO: 56703 - RNA, 55 nt, Mycobacterium avium subsp. paratuberculosis
ggccgcgcucaaacaccugggccuggcgggggccgaucaggugaugaacgcgguc

SEQ ID NO: 56704 - RNA, 67 nt, Mycobacterium avium subsp. paratuberculosis
ggccgcgugcaggcccgccacgucuccgucgggccacaccucggagacgagcgccuguaugaccgcc

SEQ ID NO: 56705 - RNA, 67 nt, Mycobacterium avium subsp. paratuberculosis
ggccgccggcagcgcagggucgaucggcagauaggccgcccccgacuugagcgcggccaggauggcc

SEQ ID NO: 56706 - RNA, 71 nt, Mycobacterium avium subsp. paratuberculosis
ggccgccucgcugguggccgcggugcugacggcgucggccgucggcuccgcgaucaccgccgaccucggcu

SEQ ID NO: 56707 - RNA, 61 nt, Mycobacterium avium subsp. paratuberculosis
ggccagcucggcgaucgcccguuguucacccaaaacgucugcggcugcgagguuuucggcc

SEQ ID NO: 56708 - RNA, 81 nt, Mycobacterium avium subsp. paratuberculosis
ggccguguccgaucagcaggucgaugcgguugcgcaucaacugguugcgcaccacgucgaucuccuugccgaucacgugcu

SEQ ID NO: 56709 - RNA, 79 nt, Mycobacterium avium subsp. paratuberculosis
ggccuaccgcaaugcuuuucggccguccgcccggcuggcgcggcccuacgugguggugucggccgacguuguggucgcc

SEQ ID NO: 56710 - RNA, 80 nt, Mycobacterium avium subsp. paratuberculosis
ggccucacucgccgaacgugaagcuaguuucacguucgcacgcgagcgugaaguuaacuucacgcucggcgguaggggcc

SEQ ID NO: 56711 - RNA, 68 nt, Mycobacterium avium subsp. paratuberculosis
ggccuuuguaggucaccuugaccucggcgaugagcagcccgauggucaggaugucgaccucgaacgcc

SEQ ID NO: 56712 - RNA, 105 nt, Mycobacterium avium subsp. paratuberculosis
ggcgacgacgcgcuccugcaaaugggcgcggauuugugccaacagcuguccuggggggcaucuccccagcagcuggaggggcucgcgcugcagcgcuccgacgcc

SEQ ID NO: 56713 - RNA, 89 nt, Mycobacterium avium subsp. paratuberculosis
gggacaccggcggcggccagcgcgucggcguaggcggccagcugcagcagcgcggucaccuucuccgagcgggccagcuugguguccac

SEQ ID NO: 56714 - RNA, 72 nt, Mycobacterium avium subsp. paratuberculosis
ggcuguucgcgcgcgccguagacguccagcacgaaaaccucguccgcggcguccagggcgcgaccgaacucc

SEQ ID NO: 56715 - RNA, 64 nt, Mycobacterium avium subsp. paratuberculosis
ggcuuucgaccugcagccggaugugcugacccgggguccagcccaguccuugcagucgcgggcc

SEQ ID NO: 56716 - RNA, 56 nt, Mycobacterium avium subsp. paratuberculosis
ggcugugcucgggcggcaggucguccucguaguagauggacuccaccgggcacacc

SEQ ID NO: 56717 - RNA, 70 nt, Mycobacterium avium subsp. paratuberculosis
gggccgaaggugucaucggcagcgcgccggccauacacccggcgggcugaccggcgauggccaucgaucc

SEQ ID NO: 56718 - RNA, 100 nt, Mycobacterium avium subsp. paratuberculosis
gggccaaccuugaaauucggccccuaguuuucaagguugaagcccuaaccucgaaaucucggggucggcgauaugccuugcugagcaggggcuuugguuc

SEQ ID NO: 56719 - RNA, 56 nt, Mycobacterium avium subsp. paratuberculosis
gggccaccucggcacccuggugaucgaagaucaugcagcgcgugcugguggugccc

SEQ ID NO: 56720 - RNA, 77 nt, Mycobacterium avium subsp. paratuberculosis
gggauugucgugguugagggugaucaggccgucguggcccucgaaggugugaaaacgcccgcgacuaccgcgaaacc

SEQ ID NO: 56721 - RNA, 129 nt, Mycobacterium avium subsp. paratuberculosis
gggauggucuugccgccgauuucgaccuccucgguggugguccgagugaccauggucagcggugucucgaaccgcaggcccuccucgaucgccaucgguaucaacgaccggucccgauagaccaucgcc

SEQ ID NO: 56722 - RNA, 108 nt, Mycobacterium avium subsp. paratuberculosis
ggcugcgcgugccugccguggucaggccgguggcgguguugcugacgacgauguucgucguugcggcgugcagcaauuccgacccgcugggagcgcaggugcgcagcc

SEQ ID NO: 56723 - RNA, 65 nt, Mycobacterium avium subsp. paratuberculosis
ggcucaacagaugucaauagugugaguucgcucgugggcuaucucacuuugaucaucucguagcc

SEQ ID NO: 56724 - RNA, 61 nt, Mycobacterium avium subsp. paratuberculosis
ggcucgacggcuggccggaagccaguccguucgccggcucuggccucggagccgccgagcc

SEQ ID NO: 56725 - RNA, 91 nt, Mycobacterium avium subsp. paratuberculosis
ggcucguucgccgccgccgagccgcagacccgggaggcgaucaucgaggaauucucccggggcgagcugcacggcggcagcugggacagcc

SEQ ID NO: 56726 - RNA, 129 nt, Mycobacterium avium subsp. paratuberculosis
ggcggugagcgcgucgacgaccgccgccucguucucgguguccagcgcgcuggucgccucgucgaccagcaguaugggcgccgguuugagcagugcgcgggcgaugcugacgcgcuggcguucaccgcc

SEQ ID NO: 56727 - RNA, 81 nt, Mycobacterium avium subsp. paratuberculosis
ggcguuggugcugugggaugaggugcaggugcacgccgccgcacccaacgugcacguggaauucacccgcuacaccgagcc

SEQ ID NO: 56728 - RNA, 130 nt, Mycobacterium avium subsp. paratuberculosis
ggcgugcuguacaacaucgcguuucccggggccuaccugugucuguccgcggcaucgcuggccuggauggcucugcgcugaaucgggcgcgaggucaggccgggaaguagcggauccgguugaucgcguu

SEQ ID NO: 56729 - RNA, 67 nt, Mycobacterium avium subsp. paratuberculosis
ggcguucgcccacaaguccgaggugcuggcagcgcauugccgcgacgugggcaccgacuucgacgcc

SEQ ID NO: 56730 - RNA, 64 nt, Mycobacterium avium subsp. paratuberculosis
ggcggucggcgggucaggcgagcagcgccgcgcgcaggcguugcacgucugccucgccgacccc

SEQ ID NO: 56731 - RNA, 69 nt, Mycobacterium avium subsp. paratuberculosis
ggcgguggggucguggcggcgguacauguuggcggugcggccggugaagccgccgcggcccagcucguc

SEQ ID NO: 56732 - RNA, 78 nt, Mycobacterium avium subsp. paratuberculosis
ggcguccagguuggcgauguccgcgccgccgcugcggucgagccgcagccaggccuccugcacggcguccugggcguc

SEQ ID NO: 56733 - RNA, 63 nt, Mycobacterium avium subsp. paratuberculosis
ggguugaugccgaccgucucgugguccagggcgcccacccgcgcgccgggacggucggcgccc

SEQ ID NO: 56734 - RNA, 56 nt, Mycobacterium avium subsp. paratuberculosis
ggucaccuccaucgcgacgucggacgccaggcacuucgacgccgcggagaugaacc

SEQ ID NO: 56735 - RNA, 59 nt, Mycobacterium avium subsp. paratuberculosis
gggugguggucaaucacgcucggcgaguucgcggcucgcaucgagauagcucaucgccc

SEQ ID NO: 56736 - RNA, 103 nt, Mycobacterium avium subsp. paratuberculosis
gggucgggcacgaaccggcgaucaugcuggccgccgcgcacaacaccuugggucaggacaagaauuugguggugguggucgacgaggcgcaguugcucgaucc

SEQ ID NO: 56737 - RNA, 60 nt, Mycobacterium avium subsp. paratuberculosis
gggucuggccaccaccaaacgccugcucgaccgcggcgcgcaggugguggucaucgaccu

SEQ ID NO: 56738 - RNA, 59 nt, Mycobacterium avium subsp. paratuberculosis
gggucuguccaccggcggcgaguacgucggcgcgaugaccuaccugguggagcaggccc

SEQ ID NO: 56739 - RNA, 68 nt, Mycobacterium avium subsp. paratuberculosis
gggugugccgcauccgugcggcgccggaccgcauaucgcggcuggccgacgcgcuggugcgacgcccc

SEQ ID NO: 56740 - RNA, 111 nt, Mycobacterium avium subsp. paratuberculosis
gggugcugauccaccagccgucgcugcagggcgugauccaggggcaguucuccgaccuggagauccaggccgccgagaucgagcggaugcgcacgcugauggagaccaccc

SEQ ID NO: 56741 - RNA, 63 nt, Mycobacterium avium subsp. paratuberculosis
ggguggucagcgcgaucuucaggccgucacccucgcggccgaccagauucucgcugggcaccc

SEQ ID NO: 56742 - RNA, 92 nt, Mycobacterium avium subsp. paratuberculosis
ggguguugaccacgcuggcccgcagcuuggccaggucucccucggugcggucgggguggcggugguagagcgcgucggugauggucaggccc

SEQ ID NO: 56743 - RNA, 113 nt, Mycobacterium avium subsp. paratuberculosis
gggcgagaccgccgaccagcucgccgcgcucggccagggccggguggaaagcgugcugugcgacgugacguccaccgcccaggucgaugcgcuguucgcgucggcccacgccc

SEQ ID NO: 56744 - RNA, 69 nt, Mycobacterium avium subsp. paratuberculosis
gggcgaugccuucgacaaggcgaagaacgacgacacguucuaccuuccgccggaggcguucaagagccc

SEQ ID NO: 56745 - RNA, 85 nt, Mycobacterium avium subsp. paratuberculosis
gggcgccacgucggguaucaccucgggcgaggccggcagcuugagcgguuggccgcguuggguggagacccgaaagcuggugccc

SEQ ID NO: 56746 - RNA, 64 nt, Mycobacterium avium subsp. paratuberculosis
gggcgcgcugugggguccggcgucgggcgcacgcuaccucgauccgcugggccuggucgcgucc

SEQ ID NO: 56747 - RNA, 76 nt, Mycobacterium avium subsp. paratuberculosis
gggcgggcaucagcagcgaccgcacgugcgccggggugacccgccgcagcgucucggcgucgucgaucagccccuc

SEQ ID NO: 56748 - RNA, 58 nt, Mycobacterium avium subsp. paratuberculosis
gggcgggucgaucugcagcgggaucagcggccgcacguugcccaggucgaccgcgucc

SEQ ID NO: 56749 - RNA, 55 nt, Mycobacterium avium subsp. paratuberculosis
gggggcgagcaccaacggggcaccgcuacgccagcggcccaugaguuuugccgcc

SEQ ID NO: 56750 - RNA, 57 nt, Mycobacterium avium subsp. paratuberculosis
gugccccagcagcucggugagcaccucggcggugugcucgccguagcgcggcggcac

SEQ ID NO: 56751 - RNA, 62 nt, Mycobacterium avium subsp. paratuberculosis
gugaccggcgccgacugguugcacgucgacgugauggacaaccacuucgugccgaaucucac

SEQ ID NO: 56752 - RNA, 112 nt, Mycobacterium avium subsp. paratuberculosis
gugccgcauccaagcgaugaccugaaccgucgaacguggaguuguugcggaaaaucggccggauccgcgcaacaaccccacguucggcgucacgacgaacgguagcgagcac

SEQ ID NO: 56753 - RNA, 105 nt, Mycobacterium avium subsp. paratuberculosis
gugccgcggucccggacacgugauggcgaucggcgggcacggccgcggcuaccggacggcgccacgcggaaucgccagcgcgccaacauguuucgggcccggcgc

SEQ ID NO: 56754 - RNA, 71 nt, Mycobacterium avium subsp. paratuberculosis
gugcagccgccgccggugcucaaggagggcgacgacugccccgacucgacgcuggcggucaaggggcugac

SEQ ID NO: 56755 - RNA, 79 nt, Mycobacterium avium subsp. paratuberculosis
gugcaggugaccgccgacgccgacgccgccgcggccgccgacggacugguggugcccggcgucggcgccuacgaggcau

SEQ ID NO: 56756 - RNA, 119 nt, Mycobacterium avium subsp. paratuberculosis
gugcggccgcgguguaggaggucgccggccugcugacggggucgcuggacagggugcggccguccagcucccacuucuugcggccgccgucgagcagcuugaccuucucguggccguac

SEQ ID NO: 56757 - RNA, 82 nt, Mycobacterium avium subsp. paratuberculosis
gugcggccugcaucgucggcgggcggguuaggagccgaacuuuuccagcagagccuugcgcugacgaucgccgagaccgcgc

SEQ ID NO: 56758 - RNA, 56 nt, Mycobacterium avium subsp. paratuberculosis
gugcuggcggucggcugcggcggcggccauaagggcggcccgagcaccaccagcac

SEQ ID NO: 56759 - RNA, 102 nt, Mycobacterium avium subsp. paratuberculosis
gugaagcucggcagccagauugacggguugcgcugcugccauaccugcuggggucaccacuucagccgcggcaccugcgcucguugcgguugccagcgucac

SEQ ID NO: 56760 - RNA, 60 nt, Mycobacterium avium subsp. paratuberculosis
gugaucgaugauggugguaagcauuucggcucccacggugccgauaccccaggcgaugac

SEQ ID NO: 56761 - RNA, 129 nt, Mycobacterium avium subsp. paratuberculosis
gucuccguagcccugcagguagguggccagccgggcgaccgucuucuucagccgcagcuguucgggcagauggucgccgacgguggcgaagcacgaccacacccgcacgcugucggggucgcggcccgc

SEQ ID NO: 56762 - RNA, 90 nt, Mycobacterium avium subsp. paratuberculosis
gucuucuuggccgcggcgaucuuggucucgcucagcucgguggucaccacccggccgcugccguugucgcggaccgcggcggccaggugc

SEQ ID NO: 56763 - RNA, 83 nt, Mycobacterium avium subsp. paratuberculosis
gucuugggcgagauguucagcccgccggcacggauguccgcggcgggcgcggucaccccguagcgggccagcaggucgucgac

SEQ ID NO: 56764 - RNA, 61 nt, Mycobacterium avium subsp. paratuberculosis
gucgugccagagccuuuccagcaggcccggcccuuugggcuccgcggguuccggcaucggc

SEQ ID NO: 56765 - RNA, 77 nt, Mycobacterium avium subsp. paratuberculosis
gucgcgcagguuucgacgagcuccugcgagcggcgggccgggcugcgcagcugguagacgacgacgccgagcgcgac

SEQ ID NO: 56766 - RNA, 95 nt, Mycobacterium avium subsp. paratuberculosis
gucgcugccggucagcaccgccgucaccugcccgaccauccggauacacccggcgaucaucgcgcaggcggcggccaccgcggccgugcagcugc

SEQ ID NO: 56767 - RNA, 79 nt, Mycobacterium avium subsp. paratuberculosis
gucggugcugcugcuguccguggggcuggccggguucugcguccacgccacccugcugggcaugcuggccggcaccaac

SEQ ID NO: 56768 - RNA, 55 nt, Mycobacterium avium subsp. paratuberculosis
gucgucgaucgcggcggccagcucgccggugggcuugucaccgccguccggcgac

SEQ ID NO: 56769 - RNA, 75 nt, Mycobacterium avium subsp. paratuberculosis
gucgucgcggcguguugcgguaucgucgccggucgcaaggcaaugugagaggugacgcaauugacgccgggcgac

SEQ ID NO: 56770 - RNA, 58 nt, Mycobacterium avium subsp. paratuberculosis
gugggccaacgugagcuccaguugcuuacgcaccagcagggguaacagguugggccgc

SEQ ID NO: 56771 - RNA, 79 nt, Mycobacterium avium subsp. paratuberculosis
guggcgugcgcggucgucaccgccgccgccuggucgucggccaguccgggcggcacggugacggccaggcgcgcgucgc

SEQ ID NO: 56772 - RNA, 63 nt, Mycobacterium avium subsp. paratuberculosis
guggcugggucuggucgccaacgucggucaggugcucaacggcgacgcgccgagcucggccgc

SEQ ID NO: 56773 - RNA, 68 nt, Mycobacterium avium subsp. paratuberculosis
guguugugaaaaguuugcgguuucagcauucugggaacagcgugucaagacgagcagaugacgcucac

SEQ ID NO: 56774 - RNA, 64 nt, Mycobacterium avium subsp. paratuberculosis
guucaaucccggcggugcgagcauugcgaaggcucccgcuuuucauucgcccguuggguuggac

SEQ ID NO: 56775 - RNA, 94 nt, Mycobacterium avium subsp. paratuberculosis
guucagccacugccgcgacgugguggccgcggugaccaaugcggguggauucggcauccugggcgccaccgcgcacagcccgcagcggcuggac

SEQ ID NO: 56776 - RNA, 79 nt, Mycobacterium avium subsp. paratuberculosis
guucgggauccaggaguuguccaccacgguguugacgucgacgaucgucagccucggccuggacagucgccuggccggc

SEQ ID NO: 56777 - RNA, 61 nt, Mycobacterium avium subsp. paratuberculosis
guugaggaacucgcugcgcaccucggacugggucugcuccagccaggcgcggcggcucagc

SEQ ID NO: 56778 - RNA, 88 nt, Mycobacterium avium subsp. paratuberculosis
guugaucgucaucuacgccgacuucaagggugaggcgggggccgacagcuuccgccacuucccgcagguugucgcggugaucuccaac

SEQ ID NO: 56779 - RNA, 70 nt, Mycobacterium avium subsp. paratuberculosis
gguggacaugguuucguucaccgggucgacggccaccgggcgcagcgugaugagcgaugccgccgccacc

SEQ ID NO: 56780 - RNA, 77 nt, Mycobacterium avium subsp. paratuberculosis
ggugccgguguccggaauaucagucaugccugcucaacccgguccggcuugacaucuauuccggacuucgugcugcu

SEQ ID NO: 56781 - RNA, 65 nt, Mycobacterium avium subsp. paratuberculosis
ggugcugcugguggcggccaccacggagaacccguccuucucggugguggcgccgcugcuguccc

SEQ ID NO: 56782 - RNA, 94 nt, Mycobacterium avium subsp. paratuberculosis
ggugcuggccgggguggagcgggcgcuggcgcuggacagcgaaccgccggacucgcuggccgaggccgacgcgcugcucaccgcggcgcagacc

SEQ ID NO: 56783 - RNA, 128 nt, Mycobacterium avium subsp. paratuberculosis
ggugcugggcuggaacuucggcgacggccaccugcacaacgaaugccucaucgaggcgcugcagcagcgcugcggguucgagccgggcgaggugcggguggugauccuggacgcccagcccauccacc

SEQ ID NO: 56784 - RNA, 100 nt, Mycobacterium avium subsp. paratuberculosis
gguggugguguucggguuggccagcuugguggugucgguccgggcgaacagcagcgacaccgacaccaccagcgcgauggcggccacgauggccgccacc

SEQ ID NO: 56785 - RNA, 69 nt, Mycobacterium avium subsp. paratuberculosis
gguugcuggcaccgcugcgcugggcgcugaucccguccggcgugcugcaggcggugaucacgcugaucc

SEQ ID NO: 56786 - RNA, 68 nt, Mycobacterium avium subsp. paratuberculosis
ggugccccuacuugucccgcucggagucggacggcccgucgcgccaggggcgggagguuuucggcacc

SEQ ID NO: 56787 - RNA, 76 nt, Mycobacterium avium subsp. paratuberculosis
ggugccgcccuggccggcgccgugcacccagaccagccagggucugggcccgucacggugccggcgcaggugcacc

SEQ ID NO: 56788 - RNA, 83 nt, Mycobacterium avium subsp. paratuberculosis
ggugcgccgggaaggugcugcgcggacucuugcuguagucgaucgagacgcagauccagccgagcagcaccauccggcucauc

SEQ ID NO: 56789 - RNA, 61 nt, Mycobacterium avium subsp. paratuberculosis
ggugacgccgcaucugcuggugaugacggcgacgccgauaccgcgcaccguggcgcucacc

SEQ ID NO: 56790 - RNA, 106 nt, Mycobacterium avium subsp. paratuberculosis
ggugaugaugucccccgccgcgauggccgccugcaccggcgccgcgccgcgccaggccggcagcagcgagaagugcagguugauccacccgugcgggggaaccgcc

SEQ ID NO: 56791 - RNA, 115 nt, Mycobacterium avium subsp. paratuberculosis
ggucgcagacgauccgcaucgucgaucccgaaaccagcacugagugcccaccgggaacggucggcgagaucugggugcauggugagaacguuucggcgggcuauuggcagcgacc

SEQ ID NO: 56792 - RNA, 88 nt, Mycobacterium avium subsp. paratuberculosis
ggucgagcuggagaagcugcgcaucgagguggucaaccguggcuucagcccgggccagaaccaccaggugcgcgaggaccuguucgcc

SEQ ID NO: 56793 - RNA, 80 nt, Mycobacterium avium subsp. paratuberculosis
ggucgcgggcauccaccuggagggcccgugguugagccgcgcccgcugcggcgcccacgacgcccgccggaugcgcgacc

SEQ ID NO: 56794 - RNA, 84 nt, Mycobacterium avium subsp. paratuberculosis
ggucggggaucgggcuuccggugcccagcagggugaccucgaucauggggccuaucuugcagggccuggagcuuggacacgauc

SEQ ID NO: 56795 - RNA, 100 nt, Mycobacterium avium subsp. paratuberculosis
ggucuggugcugggccugcugggcucgcugcggaucgggaaucgguucguccacaccggaaaaccgaccccggccggcuacgcgcaggcccgcaccgacu

SEQ ID NO: 56796 - RNA, 73 nt, Mycobacterium avium subsp. paratuberculosis
guccagcagcgcggccagcagcgcgugggaguuggccaccagcccggcgaucugcuggcugcgccggcccagc

SEQ ID NO: 56797 - RNA, 72 nt, Mycobacterium avium subsp. paratuberculosis
guccagcucgcccgcggccuggccggggcgccgcgcgcggugaugauggacgagccguucggcgcgcuggac

SEQ ID NO: 56798 - RNA, 55 nt, Mycobacterium avium subsp. paratuberculosis
guccuugcgcccguccaaggcgacggcauaccagccgcggucgggcagccagaac

SEQ ID NO: 56799 - RNA, 69 nt, Mycobacterium avium subsp. paratuberculosis
guccuggccggccaacggcugcgcaagaacgaccgcgucgucaucagcuggcugucggccaaccacgac

SEQ ID NO: 56800 - RNA, 57 nt, Mycobacterium avium subsp. paratuberculosis
gucgaccacacgccggggcacacucgcggaucgaugugcuuccgggugucgucggac

SEQ ID NO: 56801 - RNA, 90 nt, Mycobacterium avium subsp. paratuberculosis
gucgacguccucgcccgggugcugcggcuccacgaagucaaaccccuuggcguccauguaguucagcagccggcagacgaauucggagac

SEQ ID NO: 56802 - RNA, 66 nt, Mycobacterium avium subsp. paratuberculosis
gucgagcaccgcggugcugacgucgucgggauagccccguuuggccagccggccguguagcucggc

SEQ ID NO: 56803 - RNA, 61 nt, Mycobacterium avium subsp. paratuberculosis
guccaaggaguuucuggccggcaagaagucacugaccgacuucaccgugcagaacucggac

SEQ ID NO: 56804 - RNA, 72 nt, Mycobacterium avium subsp. paratuberculosis
guagcucgcuggaaaagauggguccgguccgugaaaaugggccgggcccaucgcuuuucugggaucgccugc

SEQ ID NO: 56805 - RNA, 65 nt, Mycobacterium avium subsp. paratuberculosis
guagccguggcccagcaugucgaucgaccagguccagaaauggucggcgugcgcggccagguugc

SEQ ID NO: 56806 - RNA, 73 nt, Mycobacterium avium subsp. paratuberculosis
guagcggcucagcgcguagaaguuguacuucucguuguaguacagcggcgcuucuucgcgcaugcgcugccac

SEQ ID NO: 56807 - RNA, 79 nt, Mycobacterium avium subsp. paratuberculosis
guagagggccaucgcgugagucucuguggugaaacgaccaaggaucacuaccgagaggaacaucgcgauggcccuggac

SEQ ID NO: 56808 - RNA, 55 nt, Mycobacterium avium subsp. paratuberculosis
guaccggccguccuggaggccuucgaccagaugggccucccacagcgggcggugc

SEQ ID NO: 56809 - RNA, 101 nt, Mycobacterium avium subsp. paratuberculosis
uucuccucgccgaccagguuggucaccggcacccgcacgucggaguaauagguggcgcuggugucggggccggccauggugugcaccggcguccaggagaa

SEQ ID NO: 56810 - RNA, 74 nt, Mycobacterium avium subsp. paratuberculosis
uucucgccgucggccauguccuugaacgucgcggcgguaccgccgagauacacccgggcauccgacagcgagga

SEQ ID NO: 56811 - RNA, 58 nt, Mycobacterium avium subsp. paratuberculosis
uuaggucaccgugggcccaauccucaaacgagcccgguuuuggguccaaguauccuga

SEQ ID NO: 56812 - RNA, 56 nt, Mycobacterium avium subsp. paratuberculosis
uucagggucucgccgaucaccccgccgauccggucggugacggccugaccgcugga

SEQ ID NO: 56813 - RNA, 80 nt, Mycobacterium avium subsp. paratuberculosis
ugucgcagaugaccugcagcggcagcggcccggccagcucgcugaccagcuccgccuccccguuggggugauuggcgaca

SEQ ID NO: 56814 - RNA, 123 nt, Mycobacterium avium subsp. paratuberculosis
uguuggggaaguagcccuccagggugcggccguugagguugaacuugccggugcccggcaccagccgcacccgcaccacggccuccuugcggcggccgacggucuggaugggccgcucgaaca

SEQ ID NO: 56815 - RNA, 79 nt, Mycobacterium avium subsp. paratuberculosis
ugggucaggacggugacguguucgcgaacgagcaggucguggaacucguucggggagcgcgacaccguuucgggcacca

SEQ ID NO: 56816 - RNA, 87 nt, Mycobacterium avium subsp. paratuberculosis
uggccaccucccggauuuacuuaacguuagguaagccuagcauccgguuuacuuaucgguaagucaguuaagcugguggggugggca

SEQ ID NO: 56817 - RNA, 71 nt, Mycobacterium avium subsp. paratuberculosis
uggaggucaaccugcugaugggcgggcgcggggagaaacccggucugucucaggugcaggacgacccgccg

SEQ ID NO: 56818 - RNA, 102 nt, Mycobacterium avium subsp. paratuberculosis
ugcguuggugccgguggaggcgcugggcgcggugcucgaugccggagcggccgaguggccgccgcucgagcagccgaccagcgucaccgcggccgcagcgca

SEQ ID NO: 56819 - RNA, 130 nt, Mycobacterium avium subsp. paratuberculosis
ugcucgagcacaucggcguucaucgugccgaacgugcugugcgggcggugcuucaucccgucguugaaggccugcagaaugcgcguuuugaaauccgggcgcggauggguggcgaucaccgcggcgagcg

SEQ ID NO: 56820 - RNA, 61 nt, Mycobacterium avium subsp. paratuberculosis
ugcugggcggugccgcagccgacguccaccaggccguccuuggccugcgccacgcccggca

SEQ ID NO: 56821 - RNA, 56 nt, Mycobacterium avium subsp. paratuberculosis
ugcugcgcacuuugccgcuccugaccccaugccagguguggccaagacggccagca

SEQ ID NO: 56822 - RNA, 83 nt, Mycobacterium avium subsp. paratuberculosis
ugccggugauuucgcugacccggucggggguguacugcuccaggaagcugggcaucaccucccagcccucggugaacucggcg

SEQ ID NO: 56823 - RNA, 129 nt, Mycobacterium avium subsp. paratuberculosis
ugauuuucgaccugggcggcgauucgcugguccgcauuccgacgcuggagccgcugcgcggcagcaaggcgcaugucggagcguuauuggacucgguggauagcgccgccgagcuggucgaacaacuca

SEQ ID NO: 56824 - RNA, 60 nt, Mycobacterium avium subsp. paratuberculosis
ugcacugccgugaagagugcucgcgcaaccucauguguuccccgcgcgcuuugguaggca

SEQ ID NO: 56825 - RNA, 68 nt, Mycobacterium avium subsp. paratuberculosis
ugaaccgcgaccgauaguccggggaaugccggucgaagugauaccgguucuucuuacggucgcuguca

SEQ ID NO: 56826 - RNA, 57 nt, Mycobacterium avium subsp. paratuberculosis
ucucggccggccgcgccgugucgauccacuucgaaccgugcagcgcggcggccgaga

SEQ ID NO: 56827 - RNA, 64 nt, Mycobacterium avium subsp. paratuberculosis
ucugcgccggggcaucgccggaauggccaaugagggguggccauuuucccgagucccggcaaga

SEQ ID NO: 56828 - RNA, 70 nt, Mycobacterium avium subsp. paratuberculosis
ugagccgcgaaagugcaaccagcgacguguuucccgagaggcagcgucgguagaugcacucucgcgguca

SEQ ID NO: 56829 - RNA, 65 nt, Mycobacterium avium subsp. paratuberculosis
ugaccgugccggccgggaugugcaccccgcccagggugguggucuugcgcgccagccggaagucg

SEQ ID NO: 56830 - RNA, 62 nt, Mycobacterium avium subsp. paratuberculosis
ucucauuccugagacuuucuugaauuaucgaaacucgaauguaagauucgccggggaagaga

SEQ ID NO: 56831 - RNA, 61 nt, Mycobacterium avium subsp. paratuberculosis
ucguucaccugacgguugaggcccgaggucagcucggccagccugggcaccaggucgacga

SEQ ID NO: 56832 - RNA, 126 nt, Mycobacterium avium subsp. paratuberculosis
ucguuggugugggugcugaucgcggcggugauccgcacgcugcagaaccagggguacgcgcacuggacgccgauccuggugaucuccagcaucguguucgccgccgcccuggugcucucgcugcga

SEQ ID NO: 56833 - RNA, 116 nt, Mycobacterium avium subsp. paratuberculosis
ucguaucagcgcgaguacggguuguccgccgacggcaucugcggcccggaaacguugcgcucguuguauuuucugaguucgcgggucaccggcggaucgccgcacgcgcugcgcga

SEQ ID NO: 56834 - RNA, 110 nt, Mycobacterium avium subsp. paratuberculosis
ucgguggcccggugcaaugcuguccagcgcgccgugucggaaacaugggugauggugugcccugggccugacauacgugcguuauagcaguacggcggcggcgcuacuga

SEQ ID NO: 56835 - RNA, 75 nt, Mycobacterium avium subsp. paratuberculosis
ucgucgccggcgcgggcgucccgguggugcucgacgccggcaucggcaccgccagcgaugccgcgcuggcgaugg

SEQ ID NO: 56836 - RNA, 58 nt, Mycobacterium avium subsp. paratuberculosis
ucgucgggcgcgccgaccaagcgaucauucgcggcggguucaaggugaugcccgacga

SEQ ID NO: 56837 - RNA, 97 nt, Mycobacterium avium subsp. paratuberculosis
ucggcgacccgggcgacuaucugauccggcccggcuucuggcacggcgccaucggcguggccgccugcuggcugggcggcgcgcgccgggucgccga

SEQ ID NO: 56838 - RNA, 57 nt, Mycobacterium avium subsp. paratuberculosis
ucggcucccuggcugccgcuggagcgggcgaugacgcuggacagcagcggggacugg

SEQ ID NO: 56839 - RNA, 76 nt, Mycobacterium avium subsp. paratuberculosis
ucgcugggagggucgcuaucugcgcggcgacgaccagcgcaagcuggccgagcagaucaaggugaucaaccggcgg

SEQ ID NO: 56840 - RNA, 61 nt, Mycobacterium avium subsp. paratuberculosis
ucggcagcagcuggcucagcgaggcggugcgcccgcccaggaaccaggucagcugcgccga

SEQ ID NO: 56841 - RNA, 65 nt, Mycobacterium avium subsp. paratuberculosis
ucggaccuggcgcaauuggcggacaugcuggacaccuacaccaccuucggccgggugcgccccga

SEQ ID NO: 56842 - RNA, 63 nt, Mycobacterium avium subsp. paratuberculosis
ucgccugcagauaguccagcguguccaggaaauccugguugacgcgcuccuucucguaggcgg

SEQ ID NO: 56843 - RNA, 58 nt, Mycobacterium avium subsp. paratuberculosis
ucgccugcggcaaugagcccuagcgcgaugcugcgucccgccucggugcccaggucga

SEQ ID NO: 56844 - RNA, 67 nt, Mycobacterium avium subsp. paratuberculosis
ucgaccugcggccgucggaugcggagcuggcuuucaccgccgacgucaccgaccggucgcagguaga

SEQ ID NO: 56845 - RNA, 91 nt, Mycobacterium avium subsp. paratuberculosis
ucgauccguucacccgcgaacagaccgagcuguuggccggcgcgguguugggugggccggucgacacgcgguugguggaugagcuguucga

SEQ ID NO: 56846 - RNA, 59 nt, Mycobacterium avium subsp. paratuberculosis
ucgauuucggugaacgucagcguggacaagaucaugcugggaucgcuccccgacaucgg

SEQ ID NO: 56847 - RNA, 103 nt, Mycobacterium avium subsp. paratuberculosis
ucgaugggaaagcccagccgguacagccgagcgaagaucgugaccaccugcggcgccaggucuuggugcacgaucagcucgccccgguggguuuggccgucga

SEQ ID NO: 56848 - RNA, 82 nt, Mycobacterium avium subsp. paratuberculosis
ucgcccagcgcgggcagcggcugauuuugcgggccgcccggggugcggccccggccgucgccguagagcagucccgggguga

SEQ ID NO: 56849 - RNA, 79 nt, Mycobacterium avium subsp. paratuberculosis
ucgccgggcugggcgcggacuggacggccgccaacaucgccggugugcugguggagcagguccgcgcgcagaucggcga

SEQ ID NO: 56850 - RNA, 67 nt, Mycobacterium avium subsp. paratuberculosis
ucgccguccacgccgugcagcgcgaucaccggacgcagcaucccggucugccccggcgggauggcga

SEQ ID NO: 56851 - RNA, 57 nt, Mycobacterium avium subsp. paratuberculosis
ucaggaugaagccgacuucgaccuccacccgcggguagagguagcgguucgucuuga

SEQ ID NO: 56852 - RNA, 76 nt, Mycobacterium avium subsp. paratuberculosis
ucccguuccagcuggucgacgccgccagcgggcacgugcuggcccaggcggugcuggccgcgcugcucaaccggga

SEQ ID NO: 56853 - RNA, 71 nt, Mycobacterium avium subsp. paratuberculosis
uccccagcgccucggcggcgcuggccaugguguuggccguguacaugccgccgcaggcgcccucgccggga

SEQ ID NO: 56854 - RNA, 55 nt, Mycobacterium avium subsp. paratuberculosis
uccugcgccgccacgacagcaacugguacgaccccacgcugcggcugcagcagga

SEQ ID NO: 56855 - RNA, 59 nt, Mycobacterium avium subsp. paratuberculosis
uccugacuugcuucugucgcccacauugccgaaucgauaccgcaagggccuagucggga

SEQ ID NO: 56856 - RNA, 56 nt, Mycobacterium avium subsp. paratuberculosis
uccgccggcucugagucgccgucgauuccucuuccggugcacaucgacccggcgga

SEQ ID NO: 56857 - RNA, 75 nt, Mycobacterium avium subsp. paratuberculosis
uagugacucaagauacguccgcaucgcgcccccugaccagcgacguaacgggcagcgaugcggccggucucacug

SEQ ID NO: 56858 - RNA, 60 nt, Mycobacterium avium subsp. paratuberculosis
uagucgaaggcgcguuccagcgccggaaaguauuccagcagcugggcgcgcauucgguug

SEQ ID NO: 56859 - RNA, 66 nt, Mycobacterium avium subsp. paratuberculosis
ucacgccgaacugcuggcccggcacaguguguacuacgcgaugacccaggcauagcggugggcgga

SEQ ID NO: 56860 - RNA, 98 nt, Mycobacterium avium subsp. paratuberculosis
guuguucggcggcgcgcacgcugcgguccagcuuggggaucggguuggcgccccacacccgcugcgagaucagcaggcacggcgcgugcacggacagc

SEQ ID NO: 56861 - RNA, 56 nt, Mycobacterium avium subsp. paratuberculosis
guugguggaucgucgcgaaguccuuguggcgcaacgcacugcgacgaucaaccggc

SEQ ID NO: 56862 - RNA, 69 nt, Mycobacterium avium subsp. paratuberculosis
guugcgacaguucggcuuugagcucgucgagccggucggcgcggcgcgcgcacagcgcgaggucgcggc

SEQ ID NO: 56863 - RNA, 122 nt, Mycobacterium avium subsp. paratuberculosis
uacaccugcgggcugaaccgccgguugagccgcaguuccucgucgcagucggcgcggcguugcucgaugcuggugaagucgaggaagcccagguucaccggcuucuucagcuuguaggcgua

SEQ ID NO: 56864 - RNA, 58 nt, Mycobacterium avium subsp. paratuberculosis
gccuggaccuggacuggcgcccgcaauuccggguggaccuggucccguccuacaaggc

SEQ ID NO: 56865 - RNA, 77 nt, Mycobacterium avium subsp. paratuberculosis
gcgaaacgugguggcgcagaccaagaccgggucagcccacgaggucgucauggucggugcgcaccuggacggcucgc

SEQ ID NO: 56866 - RNA, 77 nt, Mycobacterium avium subsp. paratuberculosis
gcgaaagauguuggccagccacgcguccggcuugaguucgucguaggcgggcgcgggguugucgaucucguauucgc

SEQ ID NO: 56867 - RNA, 61 nt, Mycobacterium avium subsp. paratuberculosis
gcgaacuggcgaugagccucggagcgccggcccagugccuccagcgccaucaccagcucgc

SEQ ID NO: 56868 - RNA, 94 nt, Mycobacterium avium subsp. paratuberculosis
gcgaccgcggaggcgaucaccuuggucagcagcgcggcgcugcggauggcgucgucguugcccgggaucggguagucgaccucgucggggucgc

SEQ ID NO: 56869 - RNA, 107 nt, Mycobacterium avium subsp. paratuberculosis
gcgaggccagccgcaucugcgccagccucggccugccggaacgggugcugacgcagcagcugcgcacccuguccggcgggcagcgccgccggguggagcuggcccgc

SEQ ID NO: 56870 - RNA, 72 nt, Mycobacterium avium subsp. paratuberculosis
gccugguugucgggaaggcuggucggcucgugcgaucuaccucgacgagcuguggguuuccagguagcgggc

SEQ ID NO: 56871 - RNA, 60 nt, Mycobacterium avium subsp. paratuberculosis
gcgagcagacgcgaaagcacccgacacgccgauguuuugggugcuuuugugucugcucgc

SEQ ID NO: 56872 - RNA, 90 nt, Mycobacterium avium subsp. paratuberculosis
gcgagccaucgggucaccggauggucgaugacggcgaugccgucgcccucgagcacgucgucgagcacuucggugaagccgaccgccagc

SEQ ID NO: 56873 - RNA, 60 nt, Mycobacterium avium subsp. paratuberculosis
gcgccaucaccggccacaggguccagaucgaaaacgccacguggucaccggcgauggugc

SEQ ID NO: 56874 - RNA, 64 nt, Mycobacterium avium subsp. paratuberculosis
gcgccgagcgucacgccagcgugaccgucgcgcccgggugccacgccagcgugacgcucggugc

SEQ ID NO: 56875 - RNA, 111 nt, Mycobacterium avium subsp. paratuberculosis
gcgcagcugcccuugccggacucgucggucgauguuguggucaacuuccaggugaucgagcaucugugggaccaaacacaauucgucgucgagugcgcgcgggugcugcgc

SEQ ID NO: 56876 - RNA, 88 nt, Mycobacterium avium subsp. paratuberculosis
gcgaugagcucggcggccaggucggguccgggcggcacgccgucggcgggcugcacgacggccuugacuuccucgccgaauucgucgu

SEQ ID NO: 56877 - RNA, 93 nt, Mycobacterium avium subsp. paratuberculosis
gcgccggcacaaguggacccggcugggcgccuacgcgcaguccaagcucgcggucaugcugugggggcucgagcuggaccgccggcugcgcgc

SEQ ID NO: 56878 - RNA, 57 nt, Mycobacterium avium subsp. paratuberculosis
gcgccggcgugucggcgccaccggguaagugucguggggcucagccgaagccggcgc

SEQ ID NO: 56879 - RNA, 87 nt, Mycobacterium avium subsp. paratuberculosis
gcgcgacgugcugggcuggcgcgccgccgaggucgccgaggcgaucggcaccaccacggccgccgucaacagccugcugcaacgcgc

SEQ ID NO: 56880 - RNA, 62 nt, Mycobacterium avium subsp. paratuberculosis
gcgccugcacgucggaggcggcgccgaccauguuggucaggauguggcugaccugcaggugc

SEQ ID NO: 56881 - RNA, 81 nt, Mycobacterium avium subsp. paratuberculosis
gcgcggaguucuugcgcccgggcccggguuggggcgguuccugccugcccaaggacaccgcggcgcugcuggacaucgcgc

SEQ ID NO: 56882 - RNA, 65 nt, Mycobacterium avium subsp. paratuberculosis
gcggcuugacgugcucggcgcucagcggcucuuugagcagcggguuguccagcagguagaucugc

SEQ ID NO: 56883 - RNA, 78 nt, Mycobacterium avium subsp. paratuberculosis
gcgggcggucgacuucacgcugggcuacgaggugcgcucggucaacgccgaccccgagucccggccggccgucaucgc

SEQ ID NO: 56884 - RNA, 70 nt, Mycobacterium avium subsp. paratuberculosis
gcgggccgucaggacgaagccgaaugucucgacguaguagucgaucaguuuggguacguuaugggcuugc

SEQ ID NO: 56885 - RNA, 72 nt, Mycobacterium avium subsp. paratuberculosis
gcggucggcgaauggcagcagcaucgugguggcgcugaagcgcucggcgaugguguuggccaacagcaccgc

SEQ ID NO: 56886 - RNA, 113 nt, Mycobacterium avium subsp. paratuberculosis
gcgucaugggagcugggcgccucgaucgcggccggggucaauuaccugcgggugcucaccgaaucgggguugacgaucgcugcggcguugcgccagaucagcuuccgguucgc

SEQ ID NO: 56887 - RNA, 120 nt, Mycobacterium avium subsp. paratuberculosis
gcgugcucacggugaccgcaucgccgucggcggcgccgaucucggcggcggugucggccgacagccgcagcacgggcuggcgcgccgugccggccagaugcgguucgccgucuugcaugc

SEQ ID NO: 56888 - RNA, 70 nt, Mycobacterium avium subsp. paratuberculosis
gcgucggaaaccgucgacaucgcgcggcagggcuugaucgagcugcucgacaucgacgagauccaggcgc

SEQ ID NO: 56889 - RNA, 89 nt, Mycobacterium avium subsp. paratuberculosis
gcgucuccgggucgagcagcggcgacggcgccuccucgaugaccuuuugauggcgccgcugcaggcugcacucgcguucgccgagaugc

SEQ ID NO: 56890 - RNA, 81 nt, Mycobacterium avium subsp. paratuberculosis
gcggcaaccccaucggcagcaugcucuccucguggucgaguucgcguucgaucgcgcgcaggcucuggucgggcagcaugc

SEQ ID NO: 56891 - RNA, 57 nt, Mycobacterium avium subsp. paratuberculosis
gcggccgucggagacuggaugcuuuuggcggccauccaggcguugaucgacggccac

SEQ ID NO: 56892 - RNA, 99 nt, Mycobacterium avium subsp. paratuberculosis
gcggcgaccugagcguaggucaccaucacgccgugguacuccggcgcgauccgcggguugcuguuggagaaccgcggguccagcgccaggccgugccgc

SEQ ID NO: 56893 - RNA, 100 nt, Mycobacterium avium subsp. paratuberculosis
gcggcgaucggggccagcgugcugggcgcggugguggccgccaucggcauggcgcacgccgucgcgcccaccacccuggcgguccugauguugcugccgc

SEQ ID NO: 56894 - RNA, 86 nt, Mycobacterium avium subsp. paratuberculosis
gcggcggcgaacacgaugcuggagaucaccaggaucggcguccagugcgcguaccccugguucugcagcgugcggaucaccgccgc

SEQ ID NO: 56895 - RNA, 98 nt, Mycobacterium avium subsp. paratuberculosis
gcgcgucgacggcguggaccaccugcuuggacuccucggggauguccaugacaccgaccgggaacaucaggcccggguucugcccauagucgacgugc

SEQ ID NO: 56896 - RNA, 68 nt, Mycobacterium avium subsp. paratuberculosis
gcgcgggucgcgcccgggcaggucaccgccgucgaccaggcggcggacguccuggauguggcccgcgc

SEQ ID NO: 56897 - RNA, 103 nt, Mycobacterium avium subsp. paratuberculosis
gcgcgcggccgcggcggcggccgugcauuccaacgagcugggcuacucggugucgcugggcacgccggagcugcgggccgcgaucgccgcggacuaccggcgc

SEQ ID NO: 56898 - RNA, 95 nt, Mycobacterium avium subsp. paratuberculosis
gcgcgcggcgaccgcucuggcugacgucagcgacuucgccgcguuggcggccgcgguggacgaggccgucggccgacucggucgccuggacgugc

SEQ ID NO: 56899 - RNA, 91 nt, Mycobacterium avium subsp. paratuberculosis
gcgcggguccaucgccagcgcgccgcggguggaguugcgcagccaggagccgaaccgcggccggcccaucucggggcgcucgaacucgcgc

SEQ ID NO: 56900 - RNA, 58 nt, Mycobacterium avium subsp. paratuberculosis
gcugggcaccgugccgugaugcugcagcuggaaccacagcaugaagccggugcucagc

SEQ ID NO: 56901 - RNA, 59 nt, Mycobacterium avium subsp. paratuberculosis
gcuggccgagcucaagauccaugccgccacggucacgcuggccagcgagcugggccggu

SEQ ID NO: 56902 - RNA, 83 nt, Mycobacterium avium subsp. paratuberculosis
gcugcgcccggaccuggacugggacaagggcaagacgcugcacugggugaucgagcaccugcgccgguccgggucgggugcgc

SEQ ID NO: 56903 - RNA, 56 nt, Mycobacterium avium subsp. paratuberculosis
gcugcaucgcgaaccggucgccgccgaccagcgcggcgaccucggucgcgugcggc

SEQ ID NO: 56904 - RNA, 57 nt, Mycobacterium avium subsp. paratuberculosis
gcugccagucggccgccuuggucagcacgaaggugcgggucaugucggagugguagc

SEQ ID NO: 56905 - RNA, 59 nt, Mycobacterium avium subsp. paratuberculosis
gcugcccggcuucaucgacucgaccgccgcggcggucaccagucgcggcgccgggcggc

SEQ ID NO: 56906 - RNA, 67 nt, Mycobacterium avium subsp. paratuberculosis
gcugcugaccuccgacgagcugaccaggcugaugcgcaucgcggucacccgguugggggucaccagc

SEQ ID NO: 56907 - RNA, 60 nt, Mycobacterium avium subsp. paratuberculosis
gcugcuguuggccugggccgacuaccucaauucgcgguggcaggccggccugaugguggc

SEQ ID NO: 56908 - RNA, 83 nt, Mycobacterium avium subsp. paratuberculosis
gcugcucgacgagggauugggcgcgguggacgccgacuucaugaagaaggcccagucgcggcugcagggccucgucgagcggu

SEQ ID NO: 56909 - RNA, 60 nt, Mycobacterium avium subsp. paratuberculosis
gcugaccccggcgcgccagucggccuugaucaccgugcugacccgcggcgcccgggcggc

SEQ ID NO: 56910 - RNA, 84 nt, Mycobacterium avium subsp. paratuberculosis
gcucccggagggaucaggcuugcgcuggcaacucaaccgcgcgcugcggcgggccggcguucaagcccacaucgccuucgaagc

SEQ ID NO: 56911 - RNA, 67 nt, Mycobacterium avium subsp. paratuberculosis
gcucgacguggcggccgcgcgcgauggucgccuguuuggcggcgcgggcguuggccacccagucggc

SEQ ID NO: 56912 - RNA, 86 nt, Mycobacterium avium subsp. paratuberculosis
gcucgagcugcucgcgcuggggcggcccgguggguugcggcugcugggccaucgaccgcggcgcgucguccaccagcgggucgggc

SEQ ID NO: 56913 - RNA, 55 nt, Mycobacterium avium subsp. paratuberculosis
gcucaucgucgccaucaguucgucggccgacgcgaagugcugcgcgaugauaagc

SEQ ID NO: 56914 - RNA, 81 nt, Mycobacterium avium subsp. paratuberculosis
gcuagcugccgagcguggccggauccgggugcuguuggucgacgacgcccagcagcuggauccgcaggccgcgcggcuggu

SEQ ID NO: 56915 - RNA, 93 nt, Mycobacterium avium subsp. paratuberculosis
gcuacagcgccccguggucaccaucaguugccacgacgaccucaccagcuccgaccucgucgggcgcuucauggugaccggcggcgacguggu

SEQ ID NO: 56916 - RNA, 59 nt, Mycobacterium avium subsp. paratuberculosis
ggacgucgagcacgacgaugucgccggggcagacccggcgcagcagucggucgauguuc

SEQ ID NO: 56917 - RNA, 56 nt, Mycobacterium avium subsp. paratuberculosis
ggacguguccaaacugcaugccgccgguuugugggcgaccaugcagcaggaccgcu

SEQ ID NO: 56918 - RNA, 55 nt, Mycobacterium avium subsp. paratuberculosis
ggaccugcgacugcaccccaccccgacgcacacggugacggcgaucugcggguuc

SEQ ID NO: 56919 - RNA, 70 nt, Mycobacterium avium subsp. paratuberculosis
ggaccagcugcuggcgccacugcagcccgguauggcggccccgccgcacccgauggcgccuggcagcacc

SEQ ID NO: 56920 - RNA, 63 nt, Mycobacterium avium subsp. paratuberculosis
ggacaagcugcgcgccggaccgugggaaagugagcaaacccacgagucgcugcgccgguuucu

SEQ ID NO: 56921 - RNA, 62 nt, Mycobacterium avium subsp. paratuberculosis
ggaauccacaucgccgacggcgugcccaacgacagguacuccggcucaccggugugggcgcc

SEQ ID NO: 56922 - RNA, 77 nt, Mycobacterium avium subsp. paratuberculosis
gcuucuccaccgucaccgcgaacuucgccaacgcccugcugguguggcuggccgaguucgcgcuggugguggucggc

SEQ ID NO: 56923 - RNA, 60 nt, Mycobacterium avium subsp. paratuberculosis
gccuccacccgcagagaucccaaggcgcgcaacgucauucggagcucgugggugaaccgc

SEQ ID NO: 56924 - RNA, 61 nt, Mycobacterium avium subsp. paratuberculosis
gccucgacgugcgugucgccgcgcaccugugccaccccgacaccgaggcgcacgucgacgc

SEQ ID NO: 56925 - RNA, 62 nt, Mycobacterium avium subsp. paratuberculosis
gccucgaggaccuggauucggcgcugaaggaaaccagccagcugaaccugauccucaagggc

SEQ ID NO: 56926 - RNA, 83 nt, Mycobacterium avium subsp. paratuberculosis
gccgggccagccgaaugucguugaugugcaccaucucugcgcggauccgcccgcgcagcgcgucggcgaugagcgggcccagc

SEQ ID NO: 56927 - RNA, 55 nt, Mycobacterium avium subsp. paratuberculosis
gccuaucagcucgagggcagggauucgaagcaucaccugcaugagcugguggcgc

SEQ ID NO: 56928 - RNA, 57 nt, Mycobacterium avium subsp. paratuberculosis
gccguugcggcgcaaccacuuucgguguucaucuucgacauccugcacugcgacggc

SEQ ID NO: 56929 - RNA, 55 nt, Mycobacterium avium subsp. paratuberculosis
gccguggugguuagcggcaugauggggugaugucuucuccggugaccaccacggc

SEQ ID NO: 56930 - RNA, 95 nt, Mycobacterium avium subsp. paratuberculosis
gccggaccgcgccgugcuggacuggcgguucgacgcgcugcaguucugagccgcacgcccgcgagcaccgccaugagcacggccgcgagcacggc

SEQ ID NO: 56931 - RNA, 78 nt, Mycobacterium avium subsp. paratuberculosis
gccggcgagcggaucuccaacgcgcugguggcgauggcgaucgagucgcugggcgcccaggcgcguucguucaccggc

SEQ ID NO: 56932 - RNA, 96 nt, Mycobacterium avium subsp. paratuberculosis
gccgguaugcggcgacgacgacaucggcgccccagaguuggccgccggucguggucagccgccaggcgucggcgucgucgucgaaccgggaccggc

SEQ ID NO: 56933 - RNA, 130 nt, Mycobacterium avium subsp. paratuberculosis
gccgggcggucccgcgauuucugggguccggccgcccggcuggucaaacagcuugcgccgcaacgucggacggccaucgcggugaucacgcugggcaucgccggcacggugaucggggugaucguuccgc

SEQ ID NO: 56934 - RNA, 113 nt, Mycobacterium avium subsp. paratuberculosis
gccggcggggcacaugggaagugcccgccucugagcgacaaucaccgaaguccgaucccccgacgcgucguugucgcucagaggcgggcaaaguuccuauuccccgggccggc

SEQ ID NO: 56935 - RNA, 55 nt, Mycobacterium avium subsp. paratuberculosis
gccggcguaguagcggaagaacuccgaacacgucgacaucugcagcugcgccugc

SEQ ID NO: 56936 - RNA, 84 nt, Mycobacterium avium subsp. paratuberculosis
gcccucggccuggccauggcguucggccgguuccugcccaucgugcuggugcuggcgcuggccggaucgcuggccaggcagggc

SEQ ID NO: 56937 - RNA, 75 nt, Mycobacterium avium subsp. paratuberculosis
gccgaauucauggaccucgugcaguacggccagauccgcgaggacugggccgcccuguaccggaaagccauuggc

SEQ ID NO: 56938 - RNA, 118 nt, Mycobacterium avium subsp. paratuberculosis
gcccugcucggcgcgacucuguaucgauucaagcaauucggacacgcgcuucaggguaagggcuacccauaaguaguccuaauugcccacgucggucuuagaucaggccgagcugggu

SEQ ID NO: 56939 - RNA, 100 nt, Mycobacterium avium subsp. paratuberculosis
gccgaccucaccguugaagcgcgagcagacgcaaaagcuccccgccgcccggcgugucgggugcuuucgcgucugcucgccggacgaccggggucccggc

SEQ ID NO: 56940 - RNA, 101 nt, Mycobacterium avium subsp. paratuberculosis
gccgacgacccggccgcggugugggccaacuacuuucccgccaccgacgcgcagauggcggccgagggccugggcuacuacugcggcggcgacccgucggc

SEQ ID NO: 56941 - RNA, 64 nt, Mycobacterium avium subsp. paratuberculosis
gccgacgccggcuucaccgccguccacagcgagaccaugcccggcugggaagccggcaucgugc

SEQ ID NO: 56942 - RNA, 68 nt, Mycobacterium avium subsp. paratuberculosis
gccgagauuccgacgaccuguaccgcuaccugcgcgagcaacucggccagcucgacggggugcucggc

SEQ ID NO: 56943 - RNA, 60 nt, Mycobacterium avium subsp. paratuberculosis
gccgagcgugcagccacggcgauuuuuucgcgauuuuuucgccaugagugcacguugggc

SEQ ID NO: 56944 - RNA, 59 nt, Mycobacterium avium subsp. paratuberculosis
gccgcccggcgccgcgacuggugaccgccgcggcggucgagucgaugaagccgggcagc

SEQ ID NO: 56945 - RNA, 76 nt, Mycobacterium avium subsp. paratuberculosis
gccgccgcgcccgagcgucacgcuggcgugacacucggcgccggccgucacgccagcgugacgcucggccgguggc

SEQ ID NO: 56946 - RNA, 81 nt, Mycobacterium avium subsp. paratuberculosis
gccgccgcgcgcuccgggcugaucgcccgcaccggguugagccggugcgacggcacgaucaucggggugcgcaccagcggc

SEQ ID NO: 56947 - RNA, 87 nt, Mycobacterium avium subsp. paratuberculosis
gccgcccccgccgcgagcagacacaaaagcgcccgauuccccggcgugucgcgugcuuuugcgucugcucgccagacucacggcggc

SEQ ID NO: 56948 - RNA, 74 nt, Mycobacterium avium subsp. paratuberculosis
gccgccugcagacccgcgccgucuggcggcuggucaacuuccugcucgagggcgugguguuccugcugaucggc

SEQ ID NO: 56949 - RNA, 57 nt, Mycobacterium avium subsp. paratuberculosis
gccgcggcaccgaugguguugagaccaaacagguuucgacguucuccacgcugcggc

SEQ ID NO: 56950 - RNA, 61 nt, Mycobacterium avium subsp. paratuberculosis
gccgcucguaacggcagggcgcaaaccgggccccggaaucgccguggcguuacgagcgagc

SEQ ID NO: 56951 - RNA, 91 nt, Mycobacterium avium subsp. paratuberculosis
gccacggugaugcggucaccgccgcgccggacgguuucgaggugguggccagcagccccggcgccgugguggccgcguucgagaaccgggc

SEQ ID NO: 56952 - RNA, 56 nt, Mycobacterium avium subsp. paratuberculosis
gccagcagccgcgaggugucacccaccugcugggcgaccucggacagcucgcuggu

SEQ ID NO: 56953 - RNA, 68 nt, Mycobacterium avium subsp. paratuberculosis
gccagcgaucacauccagccguggcaggacaacgagggccauucgauguuuccguggcugacgcuggc

SEQ ID NO: 56954 - RNA, 60 nt, Mycobacterium avium subsp. paratuberculosis
gccagcuggacuaccugcgccggaugaccgcguuccugcagcaggucauguucuagcggc

SEQ ID NO: 56955 - RNA, 69 nt, Mycobacterium avium subsp. paratuberculosis
gcccagcgggugcucggccugccgcgcgguuagcgccgucacagcgcuugccgagagacguugcugggc

SEQ ID NO: 56956 - RNA, 83 nt, Mycobacterium avium subsp. paratuberculosis
gcccgcagcccggccagcgugucguccgaacccguuguggcgcggcggguuugguccucgaucacgcgcgcggagucgcgggu

SEQ ID NO: 56957 - RNA, 123 nt, Mycobacterium avium subsp. paratuberculosis
gcccggucgccgucaccggcgucgccugcaggauccgccaggcgacuucgaaggacaucuucugcagcgcaaggcguuuggcgucgggguccugcgccagcgggccgugcggcgcacccaggu

SEQ ID NO: 56958 - RNA, 122 nt, Mycobacterium avium subsp. paratuberculosis
gcccggugaugaagguggcgucggugcugagcaggaaggccaccagcgcacccacgucggugcgcacgucgccgauccgcuucaucggcacccguccgaccgccuucgcauagucguugggc

SEQ ID NO: 56959 - RNA, 83 nt, Mycobacterium avium subsp. paratuberculosis
gcccgugaaauucgccuuucccguuccgcaccugaugcgccucaaggcgauugcgcagcccugggaagcggccgucaccgggc

SEQ ID NO: 56960 - RNA, 92 nt, Mycobacterium avium subsp. paratuberculosis
gcccgugcaacguggccucugcccgaaccgacccuggcguacuuccccaacgccagguucgugccuucggacagggaccucgaugcaggggc

SEQ ID NO: 56961 - RNA, 124 nt, Mycobacterium avium subsp. paratuberculosis
gcccgcccugcucggccuggcgcugcuggaggccgucgugguggccgccaucgccggacugguggugguggucaucgcgauccuggccacgaucggcaacgccgcggccgccguggugcugggc

SEQ ID NO: 56962 - RNA, 118 nt, Mycobacterium avium subsp. paratuberculosis
gcccaggugcucggccgccagcacggcgucggccagcugguccagcacgucggggugggugguuuugauggcgucgaucagcucgucgaggcggaccggguggacgaugcggaugggc

SEQ ID NO: 56963 - RNA, 57 nt, Mycobacterium avium subsp. paratuberculosis
gccaccaccgucugcucggcggccagcaccaccgccagcacccgcagccgggguggc

SEQ ID NO: 56964 - RNA, 60 nt, Mycobacterium avium subsp. paratuberculosis
gcauggcccugcccgucgucagcgccaagacggugcgcaucaacgacggcggcgccgugc

SEQ ID NO: 56965 - RNA, 96 nt, Mycobacterium avium subsp. paratuberculosis
gcauggccgucgccgaucugcgcgcggaccugcuccaccagcacaccggcgauguuggcggccguccaguccgcgcccagcccggcgaagucgugc

SEQ ID NO: 56966 - RNA, 130 nt, Mycobacterium avium subsp. paratuberculosis
gcagggcucccgcaucaucuaccgcaacccggacuucaauuccgguggugugcugaacgcucgcgaggauuucaucaccgcccacccggauuccguccaguugguggucgacaccuaugaggaggcccgc

SEQ ID NO: 56967 - RNA, 106 nt, Mycobacterium avium subsp. paratuberculosis
gcaguagggcucauuggccgucccccggugcgggugcggggucaaaaacggcgcauccguuuccaccagcagcugcccgggcgguaucaacggcacggcuucgcgc

SEQ ID NO: 56968 - RNA, 57 nt, Mycobacterium avium subsp. paratuberculosis
gagcucacccggcucgccgugcaccagaagaccggcgugcggagccggcugaugcuc

SEQ ID NO: 56969 - RNA, 60 nt, Mycobacterium avium subsp. paratuberculosis
gaguaauggucgguucuauguaaguuggaccgguucugccaacauaagagccgacgacuc

SEQ ID NO: 56970 - RNA, 71 nt, Mycobacterium avium subsp. paratuberculosis
gaggacaucgcguccgagaaguuguccaaugguguugcgcugggcgcacuuucgccggacgcggugucguc

SEQ ID NO: 56971 - RNA, 85 nt, Mycobacterium avium subsp. paratuberculosis
gagcggaucggcgaccgggccugggucaagcugaucagcucgcacgacaagcuggucucggaucuggugcggcgccaauccgguc

SEQ ID NO: 56972 - RNA, 82 nt, Mycobacterium avium subsp. paratuberculosis
gaucgccgugcugcugccgccgcagccgauggacaccgggaucgucggcuccuugcuggacggccugcacgcccuggugauc

SEQ ID NO: 56973 - RNA, 73 nt, Mycobacterium avium subsp. paratuberculosis
gaucgacggcgcgcgcucggucgugguggacgaugccgggcacuguccgcagaucgagcagccguccgugguc

SEQ ID NO: 56974 - RNA, 63 nt, Mycobacterium avium subsp. paratuberculosis
gaucucgucgaccgccacguccaggucggccagccgguccugccagucccgcucgauggguuc

SEQ ID NO: 56975 - RNA, 75 nt, Mycobacterium avium subsp. paratuberculosis
gaucugcuggugcuggcugaccagaaagucgaccacaucggugggcgacuugauggcggucggugccaugcuguc

SEQ ID NO: 56976 - RNA, 85 nt, Mycobacterium avium subsp. paratuberculosis
gaucaugcgacugaccggcaucaccacggcgauggugucggacgcgccggccaucgacgcggugcugccgauguuccucgaguuc

SEQ ID NO: 56977 - RNA, 56 nt, Mycobacterium avium subsp. paratuberculosis
gauccagcagcggccggucccgcucgucggucgagccagccagccguugccggauc

SEQ ID NO: 56978 - RNA, 78 nt, Mycobacterium avium subsp. paratuberculosis
gaguucgcccaguauggauuggccggcgcgcgcaucgaccgcaucgcgcgcgucgcccaggccagcaaggaacgccuc

SEQ ID NO: 56979 - RNA, 80 nt, Mycobacterium avium subsp. paratuberculosis
gauaccggucggacggauugccgaacaaggccagcgcugauacgugcucggccuggucggcguucagcgucugcggaauc

SEQ ID NO: 56980 - RNA, 60 nt, Mycobacterium avium subsp. paratuberculosis
gcaacugcucagccacuccuugaccuuacaacugucgcaaggucuguacugagcggaugc

SEQ ID NO: 56981 - RNA, 58 nt, Mycobacterium avium subsp. paratuberculosis
gauggugccgcggaacuucucgccgaacuccggugaguccagccagcgcgacaccauc

SEQ ID NO: 56982 - RNA, 58 nt, Mycobacterium avium subsp. paratuberculosis
gauggugucgcgcuggcuggacucaccggaguucggcgagaaguuccgcggcaccauc

SEQ ID NO: 56983 - RNA, 87 nt, Mycobacterium avium subsp. paratuberculosis
gauguagagggccaucgcgugagucucuguggugaaacgaccaaggaucacuaccgagaggaacaucgcgauggcccuggaccaguc

SEQ ID NO: 56984 - RNA, 78 nt, Mycobacterium avium subsp. paratuberculosis
gauggccucgcgcagcauguccugccggcgggugauggucggccagccuuugccgacgacaugcucguugagguuuuc

SEQ ID NO: 56985 - RNA, 108 nt, Mycobacterium avium subsp. paratuberculosis
gaugcgguucucccguucggcgaacggcaccagguucuucagcgccuugggguaggcgagcgagaagugcaccugguugcugaucaccggccggcccagcgccgcguc

SEQ ID NO: 56986 - RNA, 59 nt, Mycobacterium avium subsp. paratuberculosis
gcagcaggacgagcucaccucgcuggucgaaccgcaagacggugagccguucgugcugc

SEQ ID NO: 56987 - RNA, 62 nt, Mycobacterium avium subsp. paratuberculosis
gcagcacggccuccuccacgucgugcgucaccaaaaucguugugguaccggcccguugcugc

SEQ ID NO: 56988 - RNA, 84 nt, Mycobacterium avium subsp. paratuberculosis
gcagcagaccgacguugucaccggccuggcccuggucgagcagcuugcggaacaucuccacaccggugaccguggucuuggugc

SEQ ID NO: 56989 - RNA, 62 nt, Mycobacterium avium subsp. paratuberculosis
gcaggcgaugagccggguggccucggagaccgagcggaugacccggcuggucgaggaccugc

SEQ ID NO: 56990 - RNA, 68 nt, Mycobacterium avium subsp. paratuberculosis
gcagcugugguuggucaccaucaccgacgacgacgaccgcgucgucgcccgaggccaagugcggcugc

SEQ ID NO: 56991 - RNA, 71 nt, Mycobacterium avium subsp. paratuberculosis
gcaggcaggacggcaucgcgggccuggaccgugcccuacuggacgccgagcucgcgcugcugaccgcgggu

SEQ ID NO: 56992 - RNA, 107 nt, Mycobacterium avium subsp. paratuberculosis
gcaccgcguacaugucguccaugccgucguugcccugcgcggugcuggaguggaagagcagucccugcugcagcggggucagcggcaggaugucggcgaugcggugc

SEQ ID NO: 56993 - RNA, 76 nt, Mycobacterium avium subsp. paratuberculosis
cgggaucaccggguggcucaacaccccggacggcaaaccgcucgacccggcgguggugcgcggcaaggugauccug

SEQ ID NO: 56994 - RNA, 55 nt, Mycobacterium avium subsp. paratuberculosis
cggcugaucgcggucgagcucgacgucaccuccgagcaacaauggcgcucggccg

SEQ ID NO: 56995 - RNA, 65 nt, Mycobacterium avium subsp. paratuberculosis
cggcguggcuggccgucaucaccggcgccacgcuggugucggugucgugggcggccgccucgccg

SEQ ID NO: 56996 - RNA, 79 nt, Mycobacterium avium subsp. paratuberculosis
cggcguugucgcccuugaggaucagguucagcuggcugguuuccuucagcgccgaauccagguccucgaggcugauccg

SEQ ID NO: 56997 - RNA, 55 nt, Mycobacterium avium subsp. paratuberculosis
cgggcggcaaacccggugggagguggucgcgcacgccucuagccuacgcagcccg

SEQ ID NO: 56998 - RNA, 129 nt, Mycobacterium avium subsp. paratuberculosis
cgggcaucgucggcaguuggcccgucuggcccgccaugcccgggaucuggccggccaucgcgggaagcugcccgggcauucccggaaccugcggcauggcgccggaaagguugccgcuggcgauguucg

SEQ ID NO: 56999 - RNA, 94 nt, Mycobacterium avium subsp. paratuberculosis
cgggccuguucgguggcgucgaugcgaaucccggcggccgacgagaucgcgcccagcacggcgcauuccagcgccgccgaggacgacaggcccg

SEQ ID NO: 57000 - RNA, 59 nt, Mycobacterium avium subsp. paratuberculosis
cggucguuugaguccgccgacgauuucgagcgcgagauccaggcgcugcgcgagcaccg

SEQ ID NO: 57001 - RNA, 62 nt, Mycobacterium avium subsp. paratuberculosis
cggucccgcaaccggcucgccgaccgccagucgcgggcgauggcgacggauucgcgggucug

SEQ ID NO: 57002 - RNA, 61 nt, Mycobacterium avium subsp. paratuberculosis
cggugccgucgaucaacagcugcagcagguuggcccgcagcaugucccagucgugguagug

SEQ ID NO: 57003 - RNA, 94 nt, Mycobacterium avium subsp. paratuberculosis
cggugaucgcgucccagucgcgggcuuugaaauaggcgugcaggcgcucguaugcgcgugucgcgccauucucgagcggcggucgcggacaccg

SEQ ID NO: 57004 - RNA, 62 nt, Mycobacterium avium subsp. paratuberculosis
cgguggccgguguggccucugccaggcacuuuugcagaauggggguuggcacaugaucaccg

SEQ ID NO: 57005 - RNA, 96 nt, Mycobacterium avium subsp. paratuberculosis
cgguacugauguagagggccaucgcgugagucucuguggugaaacgaccaaggaucacuaccgagaggaacaucgcgauggcccuggaccagucug

SEQ ID NO: 57006 - RNA, 94 nt, Mycobacterium avium subsp. paratuberculosis
cgggugcgggcgcggauccugggcaucgccaagucgguguucgcggccaccgccgccaggcugggcgagcugcuagcugccgacgccgcacucg

SEQ ID NO: 57007 - RNA, 105 nt, Mycobacterium avium subsp. paratuberculosis
cgggucaguacgucggcgacggccuccuggaagccggccgcgacgucggcguucaccgcguccggguggcuuuccagguaccgcgccacggccgucuugagcccg

SEQ ID NO: 57008 - RNA, 80 nt, Mycobacterium avium subsp. paratuberculosis
cggcucuuguuguagucgaaggcgcguuccagcgccggaaaguauuccagcagcugggcgcgcauucgguugaucgcccg

SEQ ID NO: 57009 - RNA, 67 nt, Mycobacterium avium subsp. paratuberculosis
cgggucuggccgaugucauggcgaccgccgccgcgcagggggugguggcccggaucgacuggacccg

SEQ ID NO: 57010 - RNA, 59 nt, Mycobacterium avium subsp. paratuberculosis
cggcggugacggccacccgggcgcccagcgccugcgcgaccuggauggcguggcugccg

SEQ ID NO: 57011 - RNA, 64 nt, Mycobacterium avium subsp. paratuberculosis
cggcgagcagacgcaaaagcccccaaugucacggcgggucgggggauuucacgucugcucggcg

SEQ ID NO: 57012 - RNA, 129 nt, Mycobacterium avium subsp. paratuberculosis
cggcgcagguugucgcccaggccgaucggcgcguccgaggugguguccaccccgccggcggcggccacgucguagcggccggcggcgaugcccucggcggccgccaucgcggccugcaacccggugccg

SEQ ID NO: 57013 - RNA, 79 nt, Mycobacterium avium subsp. paratuberculosis
cggcgcgagcagcccggacaccgucucccggaucaccuccucgagacccacccaggucugccggcuggcggugcgcacg

SEQ ID NO: 57014 - RNA, 63 nt, Mycobacterium avium subsp. paratuberculosis
cggcgcgcccgcugaaugaacucgucgagcccggcugggcgcgugcguugcagccgguggccg

SEQ ID NO: 57015 - RNA, 104 nt, Mycobacterium avium subsp. paratuberculosis
cggcgcggcgaucgacggccuggugaucagcgccggcauccccgagcuggaggaggccgucgagcugaucgaggagcugggcgacgucggcaucagcaacgucg

SEQ ID NO: 57016 - RNA, 63 nt, Mycobacterium avium subsp. paratuberculosis
cggcgcggcgucacgcuggcgugacgcucgcuugcggcggucacgcuagcgugacgcucgccg

SEQ ID NO: 57017 - RNA, 80 nt, Mycobacterium avium subsp. paratuberculosis
cggcgcggguguccauucucggccgggugcacacuccguuggggacgcugucgcugccgcggguggagauccggaugccg

SEQ ID NO: 57018 - RNA, 74 nt, Mycobacterium avium subsp. paratuberculosis
cggccucggccaagggcccgcacgccaaacccgaggacauccgguucgggcuguacggcgcccuggcccacccg

SEQ ID NO: 57019 - RNA, 57 nt, Mycobacterium avium subsp. paratuberculosis
cggccugcaggcucacggcugcaacgaccguacggguugcagcgccgucugcagcug

SEQ ID NO: 57020 - RNA, 71 nt, Mycobacterium avium subsp. paratuberculosis
cggcgaccagguggccgcccgcacccccgacgaggagcugcgcggcugggcgcuggccgaccuggccgccg

SEQ ID NO: 57021 - RNA, 130 nt, Mycobacterium avium subsp. paratuberculosis
cggaucgccgaccugcaggugcgggcgacguaucuggccggccgccggguguacccacagugauuccgccgcugcaggaccugcuggaccggcugcacguggucgcgcugccgaugcgggugcgauuccg

SEQ ID NO: 57022 - RNA, 82 nt, Mycobacterium avium subsp. paratuberculosis
cggcaccaaccuggcguccgcguucagcuccaccaucaaggacgugucgcuggccaacugcggagacgccgggcagucgccg

SEQ ID NO: 57023 - RNA, 65 nt, Mycobacterium avium subsp. paratuberculosis
cggcacugcgccaccgguggaacggucgagguccgcgacacggccgagccggcggcgcggcgccg

SEQ ID NO: 57024 - RNA, 80 nt, Mycobacterium avium subsp. paratuberculosis
cggcccgccggcuucgcuggacugccacagguucgacgacgccgcggucugcuugcgguccggcaggaugcgguaggccg

SEQ ID NO: 57025 - RNA, 80 nt, Mycobacterium avium subsp. paratuberculosis
cggccagcucgccgaacugggcgcgcugccacagcguguagucgacguacugcaccggcagcggcguccagucggggccg

SEQ ID NO: 57026 - RNA, 67 nt, Mycobacterium avium subsp. paratuberculosis
cggcaagcccggccacgugcugccggccgagaucgccgaggccgcucccaccgccgggcugaugccg

SEQ ID NO: 57027 - RNA, 93 nt, Mycobacterium avium subsp. paratuberculosis
cggcauucaccguucgccgguacagcugcgaccacgucagggucucggcgaccccguuccagucccgcucguaaucgaugaaugugaacgccg

SEQ ID NO: 57028 - RNA, 96 nt, Mycobacterium avium subsp. paratuberculosis
cgcuggagucggcgcugcugcccgaccaggaccugccguugcggaucuucgagccccgcuacggcgcgcuggugcggcacugccuggacaccggcg

SEQ ID NO: 57029 - RNA, 56 nt, Mycobacterium avium subsp. paratuberculosis
cgcugcgagccgguauugugaucgacuccaugucggcggcgggcauggcuccagcg

SEQ ID NO: 57030 - RNA, 56 nt, Mycobacterium avium subsp. paratuberculosis
cgcgccgggccagcuccacgcacuggcgguggucgguguccagguugcccagcgcg

SEQ ID NO: 57031 - RNA, 70 nt, Mycobacterium avium subsp. paratuberculosis
cgcggcgaaaaugcuuggggguucucagcggucgguccaccccgggcgaggacaccucgagcacguagug

SEQ ID NO: 57032 - RNA, 72 nt, Mycobacterium avium subsp. paratuberculosis
cgcuacgccgacagguucgacgugcccgcggccggccccggugggcugucggugaccuggcuggggguggcg

SEQ ID NO: 57033 - RNA, 63 nt, Mycobacterium avium subsp. paratuberculosis
cgcucgccgugcucgacgacgucgcgguggaucaguuccaugaguacaagugaguaccgagcg

SEQ ID NO: 57034 - RNA, 103 nt, Mycobacterium avium subsp. paratuberculosis
cgccgcgucguggcgguugccggugguguucgucgugcagaauguccgcggcggcccggaugcccggcggugcgccuaccgguccgagacgaugcccauggcg

SEQ ID NO: 57035 - RNA, 84 nt, Mycobacterium avium subsp. paratuberculosis
cgccguucccgcccggcgucacgcuggcgugacgcucggcggcgccggucacgccagcgugacgcucggcagccgagggcggcg

SEQ ID NO: 57036 - RNA, 86 nt, Mycobacterium avium subsp. paratuberculosis
cgccguuguccaggccgugccgcugccggacgaacgagagcgccucggacgcauccagccgcuggcgcccggccgggaagucggcg

SEQ ID NO: 57037 - RNA, 69 nt, Mycobacterium avium subsp. paratuberculosis
cgcgaugauccggcugccgucggcgaccucgcgggccagcaggucaccgaagagguugccgccguggcg

SEQ ID NO: 57038 - RNA, 105 nt, Mycobacterium avium subsp. paratuberculosis
cgcgauuacgaccugagcucgcugcgcuucgcggugaccggcgcggccaccguacccgucgugcuggucgagcggaugcaguccgagcucgacaucgacaucgug

SEQ ID NO: 57039 - RNA, 98 nt, Mycobacterium avium subsp. paratuberculosis
cgcgcaaccccacccgcaucccgugccaggccgcgauccgacccaccacgaaaagaccgagaugccgggcguuuucgggaugcgggucgggguucgcg

SEQ ID NO: 57040 - RNA, 110 nt, Mycobacterium avium subsp. paratuberculosis
cgaucaggacgacgacggagaccacccaggcgaucagcaucgcgggccggcgauaccagggggugggcucagccugcuggucgaacgggucgacguugccggguugcucg

SEQ ID NO: 57041 - RNA, 106 nt, Mycobacterium avium subsp. paratuberculosis
cgaggaguugcgcggcgcggccggcgccuccugcggagucuccuccggcagcggcggcagcacccgcagcaggucguugaacuggcgcacggugcgcagccccucg

SEQ ID NO: 57042 - RNA, 63 nt, Mycobacterium avium subsp. paratuberculosis
cgauucagcccgccgaguucuccaagaucuugcugcugaucuucuucuccgcggugcugaucg

SEQ ID NO: 57043 - RNA, 72 nt, Mycobacterium avium subsp. paratuberculosis
cgcagacggaugcggcgccgagacgcggcgugaccccaccgugucgccaccggcuccgcaucgguacaagcg

SEQ ID NO: 57044 - RNA, 61 nt, Mycobacterium avium subsp. paratuberculosis
cgcagcauugcguccgccuaacgucgagaucgaccgacagaaaggcgugaucgcgauggcg

SEQ ID NO: 57045 - RNA, 75 nt, Mycobacterium avium subsp. paratuberculosis
cgauggccucgguccagccgucgaauugugcccgaucuuccucgggcacaccgagauagugggcgacgaccaucg

SEQ ID NO: 57046 - RNA, 74 nt, Mycobacterium avium subsp. paratuberculosis
cgaugccaucgggucgcgcccgcuggacaugcaucaggccggccugcgccagcugggcgccaccugcaacaucg

SEQ ID NO: 57047 - RNA, 65 nt, Mycobacterium avium subsp. paratuberculosis
cgaugccgaccacguaccggcccagccgcuugcagcgcugggccaacggaauguagucggagucg

SEQ ID NO: 57048 - RNA, 85 nt, Mycobacterium avium subsp. paratuberculosis
cgcccacgccaggccgucggccaccgacaccucgaacaacgacgacccguaguuguuuuuggccggauggccgugcuugcgggcg

SEQ ID NO: 57049 - RNA, 57 nt, Mycobacterium avium subsp. paratuberculosis
cgcaggcugcccggcugcugcccaaccuggugacggugcugggcuggcgguccugcg

SEQ ID NO: 57050 - RNA, 55 nt, Mycobacterium avium subsp. paratuberculosis
cgccacccccgagcaggcggcgauggugcugccgcccgaggucccggguguggcg

SEQ ID NO: 57051 - RNA, 104 nt, Mycobacterium avium subsp. paratuberculosis
cgccgacccggcgguccuccucgugggugugcugccagucggugacgccggugacggccgaacccaggcuggccaggaugcccaccccgagcgcgcggguggcg

SEQ ID NO: 57052 - RNA, 56 nt, Mycobacterium avium subsp. paratuberculosis
cgcccagcccgaacuaucggcugugggacaaccgcagcaacagguucggcugggcg

SEQ ID NO: 57053 - RNA, 57 nt, Mycobacterium avium subsp. paratuberculosis
cgccccaccgauugcucgaaaucccaagcgggauauggguguugaucguuggcggcg

SEQ ID NO: 57054 - RNA, 73 nt, Mycobacterium avium subsp. paratuberculosis
cgcccgcaucucgggcgcgauguaggcgaacuccacgaacggaacucccgccugcggcgccgagacauaggcg

SEQ ID NO: 57055 - RNA, 62 nt, Mycobacterium avium subsp. paratuberculosis
cgagccgggcgugcucguuggcgucgagcaggucgaccgccgacaggcggcgcugcggaucg

SEQ ID NO: 57056 - RNA, 85 nt, Mycobacterium avium subsp. paratuberculosis
cgagcggacgcugaucaucgccgacgagggcuccuacgugcacuacguggagggcugcacggcgccgaucuacaaguccgacucg

SEQ ID NO: 57057 - RNA, 88 nt, Mycobacterium avium subsp. paratuberculosis
cgaccggcucgaaggcgucaucacgguggagaucgcggcggacaagaucaccaauuucuacgugaugcgcaacccgcacaagcuggcg

SEQ ID NO: 57058 - RNA, 76 nt, Mycobacterium avium subsp. paratuberculosis
cgagaugcuguccaucgccgacguggagaucgacgugccggcgcacaaggucacccgcaacggcgagcagaucucg

SEQ ID NO: 57059 - RNA, 103 nt, Mycobacterium avium subsp. paratuberculosis
cgagcagcggcggcuggccgaggccggccacaccguccgggucuacguacccuucggcacccagugguacggcuacuucaugcgccggcucgccgaacgcccg

SEQ ID NO: 57060 - RNA, 74 nt, Mycobacterium avium subsp. paratuberculosis
cgacgggacgcagcacaccgcgguguucaacggcgaccagugcguggacaacgccguggugcgcuauuucgucg

SEQ ID NO: 57061 - RNA, 57 nt, Mycobacterium avium subsp. paratuberculosis
ccuugugaccgcgcuguacguccguauagacuggacgaucguauagcaggugcaggg

SEQ ID NO: 57062 - RNA, 68 nt, Mycobacterium avium subsp. paratuberculosis
ccuugugcuggcgcaguuuucggccgaagccgcuguccuggcccaagcugccgcccagaugcaccugg

SEQ ID NO: 57063 - RNA, 70 nt, Mycobacterium avium subsp. paratuberculosis
ccuugaaguccuggugcguccaagcggagugcaucucgaagguccgguccgcgcgcuccaggaaguaggg

SEQ ID NO: 57064 - RNA, 59 nt, Mycobacterium avium subsp. paratuberculosis
ccuugagcaccgguccggcguugacggcgaucggguggccgggcucguggcgcuccggg

SEQ ID NO: 57065 - RNA, 70 nt, Mycobacterium avium subsp. paratuberculosis
cgaagacguucugguccuucauccggugcgccagccauuggucgcccugggucuggaucagcgcguagcg

SEQ ID NO: 57066 - RNA, 89 nt, Mycobacterium avium subsp. paratuberculosis
cgaacaccggcucgucgggauuggguugcauguuccggucgaccgcgagcagcaugccgucgcggcgaaacaccuugcgccggugggcg

SEQ ID NO: 57067 - RNA, 60 nt, Mycobacterium avium subsp. paratuberculosis
ccuccuggccgcccagggcguggcugaacacggccgaaccguccggcuggcgccaggugg

SEQ ID NO: 57068 - RNA, 68 nt, Mycobacterium avium subsp. paratuberculosis
ccucccaggccuggucaucgagcuggcggucgcgcaccaggcccagcuccuuggcccggucguugagg

SEQ ID NO: 57069 - RNA, 68 nt, Mycobacterium avium subsp. paratuberculosis
ccgguacgaggacauccgggcgcugaccuacaugaacggcuucaggcuggaagugcucggcuugccgg

SEQ ID NO: 57070 - RNA, 76 nt, Mycobacterium avium subsp. paratuberculosis
ccgguugagguauuccuguucgagaauuucacggaacuuuucuaugccccaguccuugaccaggaacuucagccgg

SEQ ID NO: 57071 - RNA, 69 nt, Mycobacterium avium subsp. paratuberculosis
ccggugugcgccaccaagauaucgggcgguugggcgaucaccgccucgguguggcggugcagcuccugg

SEQ ID NO: 57072 - RNA, 98 nt, Mycobacterium avium subsp. paratuberculosis
ccguccagcaccaagaccacggucaccgguguggagauguuccgcaagcugcucgaccagggccaggccggugacaacgucggucugcugcugcgugg

SEQ ID NO: 57073 - RNA, 82 nt, Mycobacterium avium subsp. paratuberculosis
ccguccgucaggacucgcccggcgcccugcugcgcggccggguggagcggaugcaccgggcguguuugauccugaccuucgg

SEQ ID NO: 57074 - RNA, 56 nt, Mycobacterium avium subsp. paratuberculosis
ccugggcgagcccaccggcggcuacaucgaggccggcugccagggcacgcugcggg

SEQ ID NO: 57075 - RNA, 120 nt, Mycobacterium avium subsp. paratuberculosis
ccuggcccucggaugcgucgaaccagaugggugggcucaccaggacgucgcgcagcgucaugccgcguucgcgcgcgccgggggcguacucggccagauagguaucgacgaaucgccggg

SEQ ID NO: 57076 - RNA, 71 nt, Mycobacterium avium subsp. paratuberculosis
ccgcuucgacacgguguugauagcgugguuuucaugacugaacaccuugacguccucaucgugggcgccgg

SEQ ID NO: 57077 - RNA, 104 nt, Mycobacterium avium subsp. paratuberculosis
ccgcgacggcgucucgccgcaggcaugggcggugguccucaaugcgccgcagcgucccagcugcggccguagcccacggacaccuccagcgggacgucgagcgg

SEQ ID NO: 57078 - RNA, 58 nt, Mycobacterium avium subsp. paratuberculosis
ccgcgcacgcgaucaucgagguucugcucgcggagccggccgagguugcgcugcgcgg

SEQ ID NO: 57079 - RNA, 70 nt, Mycobacterium avium subsp. paratuberculosis
ccgcgccgaacgugaagcuaguuucacguucgcggucgagcgugaaacuagcuucacgcucggcaggcgg

SEQ ID NO: 57080 - RNA, 57 nt, Mycobacterium avium subsp. paratuberculosis
ccgggagaacgcggccgcggcguugcgguccggcggcguggugaucguguuccccgg

SEQ ID NO: 57081 - RNA, 81 nt, Mycobacterium avium subsp. paratuberculosis
ccgggauccuguccggcagccuguaucaccacuucuccuccaaggaggagauggucgacgaggugcugcgcagcuuccugg

SEQ ID NO: 57082 - RNA, 86 nt, Mycobacterium avium subsp. paratuberculosis
ccggcgcagguacaggugcaggucguguucccaggugacgccgauaccgccgugcaucugcacgcaggccugcacgaucugcccgg

SEQ ID NO: 57083 - RNA, 69 nt, Mycobacterium avium subsp. paratuberculosis
ccggcgcccagcagcgagaugacccggugcagcgcucgcugcgccccguuacgcguugggaauugccgg

SEQ ID NO: 57084 - RNA, 78 nt, Mycobacterium avium subsp. paratuberculosis
ccggcggcucugcugcgcugccuggucgagggcgccgacgaggugcacgucgaucccggcaucgcggcugccggccgg

SEQ ID NO: 57085 - RNA, 61 nt, Mycobacterium avium subsp. paratuberculosis
ccggcgucgacguccucgucgguggccgccaguccguccaguucgacggcgucgacgccgg

SEQ ID NO: 57086 - RNA, 76 nt, Mycobacterium avium subsp. paratuberculosis
ccggcucacgccgucggugcugggccaguugaucgcgcucuacgaacaccaggucuucaccgagggcgugaucugg

SEQ ID NO: 57087 - RNA, 73 nt, Mycobacterium avium subsp. paratuberculosis
ccggggaccugacgucggcgcugcuggaggccgagaucgacggcgaucggcucaccgacgacgaggugcucgg

SEQ ID NO: 57088 - RNA, 128 nt, Mycobacterium avium subsp. paratuberculosis
ccgggccgcugcuguucgacccgcugcgcgaaaggcuggcccacuacgccgggcuggacuuccuguccgggcugacgguggugccgggggaacucggcggcaaugccgggcugaucggcgcggcccgg

SEQ ID NO: 57089 - RNA, 65 nt, Mycobacterium avium subsp. paratuberculosis
cccuuuuugucccaaggcuguucgugggcgucgggguuggccuugauccacgccuuggcggcggg

SEQ ID NO: 57090 - RNA, 69 nt, Mycobacterium avium subsp. paratuberculosis
ccgaaacguucucaccaugcacccagaucucgccgaccguucccggugggcacucagugcugguuucgg

SEQ ID NO: 57091 - RNA, 60 nt, Mycobacterium avium subsp. paratuberculosis
cccgcgcagcgucgcggaccgguauucggugcggaacaggccgcggcguugcaacucggg

SEQ ID NO: 57092 - RNA, 56 nt, Mycobacterium avium subsp. paratuberculosis
cccgacgcgguguacgucucgcucgaggacgagcucagcgaccacacgguguccgg

SEQ ID NO: 57093 - RNA, 72 nt, Mycobacterium avium subsp. paratuberculosis
cccgggccagccgggcgacggucugcucgacgaaaacgucucgcggccggcaagucagcccggcggcacggg

SEQ ID NO: 57094 - RNA, 106 nt, Mycobacterium avium subsp. paratuberculosis
ccgaggcauucccgcgccgaaacgcugaccugcgaccaggaccgguccggcacgcugggcuugaggucgucgcggucaccggagucggugcucgacgcccauucgg

SEQ ID NO: 57095 - RNA, 88 nt, Mycobacterium avium subsp. paratuberculosis
ccgaggcgguggccgccgcgcgugcgcaccggcgcagcuucgucgccgaccggcuggccaccggcaccgcggcgcuguucgcguucgg

SEQ ID NO: 57096 - RNA, 92 nt, Mycobacterium avium subsp. paratuberculosis
ccgacauagaaaugucacccaucaaccgacucugaacaggggcacuuugucuguuguaugaccucgguugaugcuugacguuucggcuucgg

SEQ ID NO: 57097 - RNA, 67 nt, Mycobacterium avium subsp. paratuberculosis
ccgagccgcaacguuugauuuugugucugagacaagaccacaggugaucaucgaugcggccgcacgg

SEQ ID NO: 57098 - RNA, 70 nt, Mycobacterium avium subsp. paratuberculosis
ccgccgccgccagcaccgcgcugugcguggcgcugggggugccgauggcgcuggugcuggcgcgcggcgg

SEQ ID NO: 57099 - RNA, 76 nt, Mycobacterium avium subsp. paratuberculosis
ccgcccgauccugcgccucggugguggacgcacccagaugcggcgugaccaccaccugcggcagcucgaacagcgg

SEQ ID NO: 57100 - RNA, 81 nt, Mycobacterium avium subsp. paratuberculosis
ccgcccugcgccgcgccgugccggccaccaagggcaacacccgccggcuggccacgcucggcccgcugcugcaggaccugg

SEQ ID NO: 57101 - RNA, 94 nt, Mycobacterium avium subsp. paratuberculosis
ccgacccgugcgacgggugauagaucugguugauguuggccgcggccgucggcagcacgugcagcgcggucuccagcccguucagcggguccgg

SEQ ID NO: 57102 - RNA, 64 nt, Mycobacterium avium subsp. paratuberculosis
ccgacguugcgcagggcguccacccagggccggacgaccucggcgcugcccggcgcgauguugg

SEQ ID NO: 57103 - RNA, 130 nt, Mycobacterium avium subsp. paratuberculosis
ccgcaucccggacgccgaguuggugaucgugggcgggccgccggcggccgaacuggccggcgacgagcaggcgcggcggcugcaacgacugaccggcgagcucggcgucgccgaccgggugcggcugcug

SEQ ID NO: 57104 - RNA, 65 nt, Mycobacterium avium subsp. paratuberculosis
cguggucauccaggcgguguucggcuucagccugcucgaggcggucaacuaccuggagcacuacg

SEQ ID NO: 57105 - RNA, 130 nt, Mycobacterium avium subsp. paratuberculosis
cguugccggucaugaaggucacgaaguagccggcggagugcgugaaggcgguggcucccagcaccccggccagcaccgccagcacccacgacaaccugguuucgcuguuguugaucucacucggcacacg

SEQ ID NO: 57106 - RNA, 103 nt, Mycobacterium avium subsp. paratuberculosis
cgugcaaugggugagacugcccaccacgccgucgggccagcgggguucucccuucucgcccuugaggaucggcgccgggggcaggccgagcucgcccagcgcg

SEQ ID NO: 57107 - RNA, 59 nt, Mycobacterium avium subsp. paratuberculosis
cgugccccgcgacaagccaggcuagucucgcaaaaggcaacugcgcaccgcggggcgcg

SEQ ID NO: 57108 - RNA, 98 nt, Mycobacterium avium subsp. paratuberculosis
cgucggugaagaugaggucggccagguuguuguuggugcggcgcaaccggcgggccagcacccgcaacagcuguucggcgaucucggggcggucggcg

SEQ ID NO: 57109 - RNA, 83 nt, Mycobacterium avium subsp. paratuberculosis
cgucguagaugucggacgccuugccgaagucgcuccacuuguucggggugaggguggcguacagggugccgucgacgacgacg

SEQ ID NO: 57110 - RNA, 115 nt, Mycobacterium avium subsp. paratuberculosis
cgucugccaguucaccauggucaaguaagccggccagcgucgaguuguugggccgaaaaacggcuuaaucgcccaacaacucgacguucggcgggcaggccgaagaacucagccg

SEQ ID NO: 57111 - RNA, 71 nt, Mycobacterium avium subsp. paratuberculosis
cgugcgggccaaccggcuggcccggcugcucgacgacgacgcgccgcugggccgggcgguggcgccggacg

SEQ ID NO: 57112 - RNA, 116 nt, Mycobacterium avium subsp. paratuberculosis
cgucaaacacugcacgugauugccucgcgggaccgcaggcugcucaaaacggcacggguauugccugccaccggucucgaacucaugagggcgacacucagugaccaauuuugacg

SEQ ID NO: 57113 - RNA, 123 nt, Mycobacterium avium subsp. paratuberculosis
cggugggccggucgguuugggcgccggcgugcaccugcuggaucacggcgucgaaauaggugucauauugccgggcccgcgcgggugccgccccgccgagcaccugggccaccagguucaccg

SEQ ID NO: 57114 - RNA, 60 nt, Mycobacterium avium subsp. paratuberculosis
cggugguggcggcgcuggcgcacacgcccccgguguacgaauucgccgucgccaaugccg

SEQ ID NO: 57115 - RNA, 107 nt, Mycobacterium avium subsp. paratuberculosis
cguccuccaugguggugcggcgcaucccgacgaguucggccuguucgaggguggcggccagaauucgggcggugaucucgucgggguugucgaccugggcgaggacg

SEQ ID NO: 57116 - RNA, 90 nt, Mycobacterium avium subsp. paratuberculosis
cgucccacggugcggccgacaaggcaugcggcaguuggaaucccacgacauugcucagcagcuuguucagguagccgcuccaguucaccg

SEQ ID NO: 57117 - RNA, 89 nt, Mycobacterium avium subsp. paratuberculosis
cgucgccgggucggagcuggcgcugauguaggccgccagguagucgcgcuugaaccgguucaucgcgcuggucagcugauacgacgacg

SEQ ID NO: 57118 - RNA, 120 nt, Mycobacterium avium subsp. paratuberculosis
cucggcgcggucaccgggguggggcacgcgcggcugaucaacgagcgcuucggccggggcuggggcugguucucggucggcgaccuguucuugcucaauuucuugaccaucgucaccgag

SEQ ID NO: 57119 - RNA, 62 nt, Mycobacterium avium subsp. paratuberculosis
cuacgugggauaugcgacgggagccagcuggccguugcuggacgcgggccugucccacgugg

SEQ ID NO: 57120 - RNA, 68 nt, Mycobacterium avium subsp. paratuberculosis
cguugugggcuuggcgcagcgccgcauagacgucgacguugugcggugcgaugccgggcagaugcacg

SEQ ID NO: 57121 - RNA, 64 nt, Mycobacterium avium subsp. paratuberculosis
cugguugggggcgcugggauuugccgcccuggcggucuauuggcucuaucgcuucgucggccag

SEQ ID NO: 57122 - RNA, 78 nt, Mycobacterium avium subsp. paratuberculosis
cugcgcaccggcggcucguacuagagggccuucgcgaucagccgaagggucuaguugaacgagucgccgcaggcgcag

SEQ ID NO: 57123 - RNA, 76 nt, Mycobacterium avium subsp. paratuberculosis
cugcccuggugaaucggcccauagcggacacacuagaacguguucucccguuuuucgggucaguucaucgggucgg

SEQ ID NO: 57124 - RNA, 74 nt, Mycobacterium avium subsp. paratuberculosis
cugcuggcgcaccagggugccgccuccaggucgcgcgcugacgugauggguggcggcgacccgcgcgccggggg

SEQ ID NO: 57125 - RNA, 68 nt, Mycobacterium avium subsp. paratuberculosis
cucugaccagcauccgacgcgccggagccgauaucguucugagcuauugggccgcggaugcggcaggg

SEQ ID NO: 57126 - RNA, 56 nt, Mycobacterium avium subsp. paratuberculosis
gagaaccaguccucgggcgucauccccaucaugaagcugcuggaggacucguucuc

SEQ ID NO: 57127 - RNA, 129 nt, Mycobacterium avium subsp. paratuberculosis
gacgacgggcgcgucggccagcgucucuucgaucgcugcggucaggccacugcucggcccgaccuccaggaaacgggucgcaccggccgacugcgcgaaccgcacgcugucggcgaagcgcaccgcguc

SEQ ID NO: 57128 - RNA, 69 nt, Mycobacterium avium subsp. paratuberculosis
gacggcccggucguucuuccccaacguggugaccacccacaccugggaagagcgcugggacaccuuguc

SEQ ID NO: 57129 - RNA, 62 nt, Mycobacterium avium subsp. paratuberculosis
gacggcgaugaggaucugucucaucggcgggucccgccggcugagucgcccucgcgaucguc

SEQ ID NO: 57130 - RNA, 71 nt, Mycobacterium avium subsp. paratuberculosis
gaccaagcuggugcccgggccgcugacgcccaaggacucgcacuggcgccacgcccgggcaccuggugguu

SEQ ID NO: 57131 - RNA, 116 nt, Mycobacterium avium subsp. paratuberculosis
gaccaccaaugcccgguagccgggcgggaugguggccagcacccccggcagcgacuccucuucguugaggcagggcaggaccaccgugacccgaccgucggugccgggcacggguc

SEQ ID NO: 57132 - RNA, 77 nt, Mycobacterium avium subsp. paratuberculosis
gacccggcggcgcucggcgcgccgccgcgcccgccgguguucguguuggugguggucgcgcugacgcucgccggguu

SEQ ID NO: 57133 - RNA, 61 nt, Mycobacterium avium subsp. paratuberculosis
gacccggcugccggaccaccucaucgucaucgacaacgaugcgugcgacgacggccggguc

SEQ ID NO: 57134 - RNA, 108 nt, Mycobacterium avium subsp. paratuberculosis
gaccgcggcggccacggccugggcggcguugccgcgguucaccgcgcccgguagcgccaaccgcaucggcagcgccacaccgccggggccguacagguugccgccguc

SEQ ID NO: 57135 - RNA, 63 nt, Mycobacterium avium subsp. paratuberculosis
gaccgcgucaccgccggcguggaccggcugggcuaccggcugauccggcugagcgggcagguc

SEQ ID NO: 57136 - RNA, 60 nt, Mycobacterium avium subsp. paratuberculosis
gacgaauuccuggacauggucaccggguggacccgcacccgcaccacccaggagaucguc

SEQ ID NO: 57137 - RNA, 86 nt, Mycobacterium avium subsp. paratuberculosis
gaagccggugggaacggugugcuucagcgugcaggucggcccacccggugccacggcccgcucggacacccgcaccaugcggcuuc

SEQ ID NO: 57138 - RNA, 56 nt, Mycobacterium avium subsp. paratuberculosis
gaagcgcugcgccgcuuacccguugcggcccggccgguuugcggugcagcacuguc

SEQ ID NO: 57139 - RNA, 82 nt, Mycobacterium avium subsp. paratuberculosis
gaagggcaccagcgcguugaccgagccaccggucgcgaccagcaacgccaccgacaacgcggucagggugaugaugccguuc

SEQ ID NO: 57140 - RNA, 67 nt, Mycobacterium avium subsp. paratuberculosis
gaaggugucggggucggcgguggcgugguagugcuuggcgcccagccgcagcccguccuccaucuuc

SEQ ID NO: 57141 - RNA, 56 nt, Mycobacterium avium subsp. paratuberculosis
gaaccccgccgauuuccuggugcugcaucgacuugccaagggaguauucgggguuc

SEQ ID NO: 57142 - RNA, 68 nt, Mycobacterium avium subsp. paratuberculosis
gaacaggugcuggccgacauggcgagaaucgacgaccacggggaugccgugcuuggccagcucgcguc

SEQ ID NO: 57143 - RNA, 71 nt, Mycobacterium avium subsp. paratuberculosis
aaggugcgggccagcuggugccacugguaguugguccacgaguccagcaggucgcgguuggccagcagcuu

SEQ ID NO: 57144 - RNA, 89 nt, Mycobacterium avium subsp. paratuberculosis
aacgacaaggacaucaagcaguacgcgaugucggaucugcugaucgcggcgaucgcggcguucgugcugaucuucuugaucauguuguu

SEQ ID NO: 57145 - RNA, 65 nt, Mycobacterium avium subsp. paratuberculosis
accuugacggcgugcccgacguugcccgcguucaucgcgaagguggcgcugagcgcguccagggu

SEQ ID NO: 57146 - RNA, 128 nt, Mycobacterium avium subsp. paratuberculosis
acggugcgcacgcuccaccgguuggccggcgcgcagaucuccucgacgacgucggugaugauuucgaucagcccggccagcucgucggggucgcgcugcagguucuccguggaaagcagguacaccgu

SEQ ID NO: 57147 - RNA, 64 nt, Mycobacterium avium subsp. paratuberculosis
acgccccggccgaacccggacgugcgaagacagucaucugcucucacuccucguucaccugugu

SEQ ID NO: 57148 - RNA, 67 nt, Mycobacterium avium subsp. paratuberculosis
accugggccagaugcucgacuuccacgccgcgcagcaggccgacgucacccugcaccugguccgggu

SEQ ID NO: 57149 - RNA, 56 nt, Mycobacterium avium subsp. paratuberculosis
accugggcgcgccggucgagccgcgcauccccgcgcugagcggccaacccccgggu

SEQ ID NO: 57150 - RNA, 55 nt, Mycobacterium avium subsp. paratuberculosis
accuccagcacccgggucagcgcguccauuuugcgcgggccggcgaccuggaugu

SEQ ID NO: 57151 - RNA, 85 nt, Mycobacterium avium subsp. paratuberculosis
accgcucgaacuccucguaggccaccgcgcacucgcccgcccgcagcugcaggguggccagcgacaccuugaguuccagggcggu

SEQ ID NO: 57152 - RNA, 59 nt, Mycobacterium avium subsp. paratuberculosis
accauggccgcccgggugguguggcugaucgccaacggcuacgcccaccccggccaggu

SEQ ID NO: 57153 - RNA, 61 nt, Mycobacterium avium subsp. paratuberculosis
accacgaggaccagcgucgcgaacccgaucagaaaccaguucucgauguggccgacguggu

SEQ ID NO: 57154 - RNA, 55 nt, Mycobacterium avium subsp. paratuberculosis
accagcagcgcgucacgcugagcuccuaccgcggcuccaagaacgugcugcuggu

SEQ ID NO: 57155 - RNA, 117 nt, Mycobacterium avium subsp. paratuberculosis
acagcgccggguccaggaugucgggccgguugguggcggcgaucaggaucacgccggcccgcgggucgaacccguccaucucgaccagcaacugguucagcgucugcucgcgcucgu

SEQ ID NO: 57156 - RNA, 65 nt, Mycobacterium avium subsp. paratuberculosis
aggcggccguggaggagggcaucgucgccggcgguggcguggcccugcugcacgcgaucccggcu

SEQ ID NO: 57157 - RNA, 81 nt, Mycobacterium avium subsp. paratuberculosis
aggcaggcccaugcucagcacgauucgcaaaguccuggacuaucaguugaccaucgccgaacugcugggccugggcauccu

SEQ ID NO: 57158 - RNA, 57 nt, Mycobacterium avium subsp. paratuberculosis
aggggcugcacgucggccacccgcugggcuacaucgccaccgacguguacgcccgcu

SEQ ID NO: 57159 - RNA, 71 nt, Mycobacterium avium subsp. paratuberculosis
agggccaucgcgauguuccucucgguagugauccuuggucguuucaccacagagacucacgcgauggcccu

SEQ ID NO: 57160 - RNA, 71 nt, Mycobacterium avium subsp. paratuberculosis
agggccaucgcgugagucucuguggugaaacgaccaaggaucacuaccgagaggaacaucgcgauggcccu

SEQ ID NO: 57161 - RNA, 103 nt, Mycobacterium avium subsp. paratuberculosis
aggucgccguccgggaccggaucggcccgcucgaugcgucggcgcgcccggcuggccagcuugcgggccgacuccggcgugccguccacgaucgcggcgaucu

SEQ ID NO: 57162 - RNA, 73 nt, Mycobacterium avium subsp. paratuberculosis
aggucacccugggcgaguuggugaucgacgagggcaccuauaccgcccgguugcgcggccgcccgcuugaccu

SEQ ID NO: 57163 - RNA, 88 nt, Mycobacterium avium subsp. paratuberculosis
aggugacgagcccgaccagacccagcagcaccgacgcgacgccgaacucguuacgcggcggcugcgggucacucaucgccucucaccu

SEQ ID NO: 57164 - RNA, 72 nt, Mycobacterium avium subsp. paratuberculosis
agguggucaaggacuacgucgcguucccggcgcugacgucacugucgcccggcgcgaccuuccuguccaccu

SEQ ID NO: 57165 - RNA, 90 nt, Mycobacterium avium subsp. paratuberculosis
aggugucgccgaucgacagcuugucgccgacgugcgcgucgcagaugaugcgccgcgccagcagcccggcgaccuggaccgcgaccaccu

SEQ ID NO: 57166 - RNA, 67 nt, Mycobacterium avium subsp. paratuberculosis
agcagguggugcgcugcagcgaccgguccggcuucguggucaacgcgcugcuggugcccuaccugcu

SEQ ID NO: 57167 - RNA, 79 nt, Mycobacterium avium subsp. paratuberculosis
agccgcaaguuuuucugcauucgaaaguacuauuucaggauuucugaaguaucuagaugaauucagugagaauucgguu

SEQ ID NO: 57168 - RNA, 130 nt, Mycobacterium avium subsp. paratuberculosis
aggacgcccucgucgucgcgcagcccgccgaacccggacaccagcgccguccacgcgccggccagcgaggccaugugcaggccgucgcggguguuguggugcaggucgcgcaggucgaucagggcggccu

SEQ ID NO: 57169 - RNA, 83 nt, Mycobacterium avium subsp. paratuberculosis
agcuucuugcgauugcggcuggcgaccagcagcgggcucaacaguuaucccugaacaugcgucggcugcacuugcacgacucu

SEQ ID NO: 57170 - RNA, 65 nt, Mycobacterium avium subsp. paratuberculosis
agcugggcgacuuucgcggaguucuggaaccugauccacggauccaucugcaggguggcccaguu

SEQ ID NO: 57171 - RNA, 89 nt, Mycobacterium avium subsp. paratuberculosis
acugauguagagggccaucgcgugagucucuguggugaaacgaccaaggaucacuaccgagaggaacaucgcgauggcccuggaccagu

SEQ ID NO: 57172 - RNA, 86 nt, Mycobacterium avium subsp. paratuberculosis
acucagugucuuuggucgcggugcgcaggaaugccgucaccggcgacguguagcgcagcauuucuucgaucgcggucggcaugagu

SEQ ID NO: 57173 - RNA, 121 nt, Mycobacterium avium subsp. paratuberculosis
acugcugcggggacagcuagaucgugggaggcagaugugguugugagcguuaggggacacagcgucccccacuuccauuucccuugcccgcgauguggguaugcgacccgcuacaagcagu

SEQ ID NO: 57174 - RNA, 91 nt, Mycobacterium avium subsp. paratuberculosis
agcaccgggugaaucuggcggggucgacggcagagcggaucucggugcccuacuucuucaauccgcgccucgacgcccggauacccgugcu

SEQ ID NO: 57175 - RNA, 129 nt, Mycobacterium avium subsp. paratuberculosis
caccgaacggcuggcccaggaucucgacgggcugaccugcgcggcccggccacugaccgccgaggagaucgccgagguggaccgggcggugcuggccgaccuggaaccgaccuggagccgccccgggug

SEQ ID NO: 57176 - RNA, 61 nt, Mycobacterium avium subsp. paratuberculosis
caccgaccugcucgacggguggguggccuacuucgccgaccacccgcacgagcgggcgcug

SEQ ID NO: 57177 - RNA, 55 nt, Mycobacterium avium subsp. paratuberculosis
caccagcaggauugggacgucgggccagaugcugacgugccagcgcgcgcuggug

SEQ ID NO: 57178 - RNA, 55 nt, Mycobacterium avium subsp. paratuberculosis
caccagcgcgcgcuggcacgucagcaucuggcccgacgucccaauccugcuggug

SEQ ID NO: 57179 - RNA, 84 nt, Mycobacterium avium subsp. paratuberculosis
caccguggcguugcggccgccguacuccggcggcuggcugggcagcagccagccguugucgaacagcagccguugccagcggcg

SEQ ID NO: 57180 - RNA, 76 nt, Mycobacterium avium subsp. paratuberculosis
cacgaugugaugggucugcgccucgaucagcgcgaaauacgacgagccgacguaaccguacggcccgaacaccgug

SEQ ID NO: 57181 - RNA, 57 nt, Mycobacterium avium subsp. paratuberculosis
cacgcacccgccgaucgaggaccggauccgccgccuggaauccauggcggggcgcug

SEQ ID NO: 57182 - RNA, 96 nt, Mycobacterium avium subsp. paratuberculosis
cagauacucgccgcuguccugaucgcgcaucagcugcccgcgcagauagcccuugcgcccggccaccgacgugaugggcgacagcgugcgggccug

SEQ ID NO: 57183 - RNA, 58 nt, Mycobacterium avium subsp. paratuberculosis
caacgcugcgaucugccccgccgcgguuuuuugcgccucggccaggcucgcggcgaug

SEQ ID NO: 57184 - RNA, 79 nt, Mycobacterium avium subsp. paratuberculosis
caacugcgguuuuuugcgcgcguaccggaucuaguggcacacucauuuggugcucaccgugcaguguuaccggcgguug

SEQ ID NO: 57185 - RNA, 78 nt, Mycobacterium avium subsp. paratuberculosis
aucgcaccugggguucaucuccgcggcgucgaagugccuggcguccgacgucgcgauggaggugaccacggacgcggu

SEQ ID NO: 57186 - RNA, 73 nt, Mycobacterium avium subsp. paratuberculosis
auccggccgcagcguguucagcccgguggucuucagccacugccgaccccagucggacaggucgcggccggau

SEQ ID NO: 57187 - RNA, 58 nt, Mycobacterium avium subsp. paratuberculosis
aucaggucggugcggugcuuggggaacagcaccccgcgcgacaccucgccgaccuggu

SEQ ID NO: 57188 - RNA, 57 nt, Mycobacterium avium subsp. paratuberculosis
auggcagcggauccucgacaucaaccugaccggaguguuucugggcauccgcgccgu

SEQ ID NO: 57189 - RNA, 78 nt, Mycobacterium avium subsp. paratuberculosis
auggacgcuggugauggcggcgaccaccaucgcgaucgucccgcuggucacgcuguucgucaucuuccagcgucacau

SEQ ID NO: 57190 - RNA, 86 nt, Mycobacterium avium subsp. paratuberculosis
auggugggcucccaccgggccagcgccuuggacuugaacgccgccgacaccagguugcgguggucccggugcuucuugcccuccau

SEQ ID NO: 57191 - RNA, 129 nt, Mycobacterium avium subsp. paratuberculosis
cccgaagaucaccgucugcggguugagccgccgggcggagucggcgcgcugcagcgcaucgaaugccgacggcguuuggcugagcacgucgacccguuccucgaucagcaaggcgcacaggucuuccgg

SEQ ID NO: 57192 - RNA, 62 nt, Mycobacterium avium subsp. paratuberculosis
ccacgcacugaccgggcugcaggucgauccacuucucgcugugcgagcccggcgguagcggg

SEQ ID NO: 57193 - RNA, 76 nt, Mycobacterium avium subsp. paratuberculosis
cccaggcgguugccgagucguggucggugacccgguggucgcugggcggcagcucggcauagcccaauccccuggg

SEQ ID NO: 57194 - RNA, 59 nt, Mycobacterium avium subsp. paratuberculosis
ccauugccgcgccgcgacgauguuggucaccaggaucagcgucgucgcgccggcuuugg

SEQ ID NO: 57195 - RNA, 62 nt, Mycobacterium avium subsp. paratuberculosis
ccauuguggccggugucucaugucguaugaguacuaucugacacauggcgacggcccgaagg

SEQ ID NO: 57196 - RNA, 90 nt, Mycobacterium avium subsp. paratuberculosis
cccaacccgaaugccgacccgcuucgguggcguggaugguggaaaccauuggcacgucguagaauugggcgagcgcgaucgcgggauggg

SEQ ID NO: 57197 - RNA, 58 nt, Mycobacterium avium subsp. paratuberculosis
ccagcccgagcaccggcgcggcucguucggcaaacccgcgcccggguucgaggccagg

SEQ ID NO: 57198 - RNA, 56 nt, Mycobacterium avium subsp. paratuberculosis
ccagcccuaugagcagcccggcaagaagcgccccgucgggcugaucgccggggugg

SEQ ID NO: 57199 - RNA, 56 nt, Mycobacterium avium subsp. paratuberculosis
ccagcacgcggcguccaucaucguggccaccagccgcgacgacaccgccgugcugg

SEQ ID NO: 57200 - RNA, 100 nt, Mycobacterium avium subsp. paratuberculosis
ccagccggcgcaccgccagcgcgggcugcucgggggugggcucgucgagcccgagcaccggauccaguccgcgcauguagggggccagcgccaggugcgg

SEQ ID NO: 57201 - RNA, 75 nt, Mycobacterium avium subsp. paratuberculosis
cauguaugggccgacggcggcauccggcacccgcgugacguggcgcuggcgcuggccgccggggcgucgaacgug

SEQ ID NO: 57202 - RNA, 63 nt, Mycobacterium avium subsp. paratuberculosis
ccaaauacguugggcagaaacgcuuuucgcuggaaggcgcggaaagugugaucccgaugaugg

SEQ ID NO: 57203 - RNA, 63 nt, Mycobacterium avium subsp. paratuberculosis
ccaagcccggccgcagccuggagcggcucaaguccgagcugcugcugcugauggcgggcgugg

SEQ ID NO: 57204 - RNA, 75 nt, Mycobacterium avium subsp. paratuberculosis
cagcaucgcgaccgugccggcgagcaggaugcccaacguguccugcgacccgucgcgcgggcgcugcgggugcug

SEQ ID NO: 57205 - RNA, 79 nt, Mycobacterium avium subsp. paratuberculosis
cagccccaagucgguggccacgaucgccgcgguggcggugaucuucgucggcggcaucguggcccuggcgugggcgcug

SEQ ID NO: 57206 - RNA, 129 nt, Mycobacterium avium subsp. paratuberculosis
cagccggucccccagauuggagccgauggauaagacaacgcgugucauuggcgccgcuccucaaccgcggcugcgccggcgucaucgucgucgucgcgugucauuggcgccgcuccucaaccccggcug

SEQ ID NO: 57207 - RNA, 122 nt, Mycobacterium avium subsp. paratuberculosis
caggacggcgucgaaauccauugcccgucuacagcaauugggugcuggcgccgccgucggcguagaugauggugccggugguggccggcagccagucggacagcagcgcgcacaccgucuug

SEQ ID NO: 57208 - RNA, 64 nt, Mycobacterium avium subsp. paratuberculosis
caggaucggcgcguucuucgaccuggacggcacccuggucgccggguucaccgcggugauccug

SEQ ID NO: 57209 - RNA, 82 nt, Mycobacterium avium subsp. paratuberculosis
caucaugggcaccgggcuggccgcggcggcgcuggccggcaacggcacgcccgaacagcugggccgcugguugcccgagaug

SEQ ID NO: 57210 - RNA, 76 nt, Mycobacterium avium subsp. paratuberculosis
caucgacuccccgauccuggggccgggcccgagcaucgcguugaugcucagccuggugcccagcgccgagccgaug

SEQ ID NO: 57211 - RNA, 73 nt, Mycobacterium avium subsp. paratuberculosis
caucgcccuggccgaccagcugauucgcgccggagaguucgacguggugguagccggcggucaggagucgaug

SEQ ID NO: 57212 - RNA, 60 nt, Mycobacterium avium subsp. paratuberculosis
caugaggugacguucgaauccgcuagcgccugcgguagcgcguucgaaagugacgucgug

SEQ ID NO: 57213 - RNA, 57 nt, Mycobacterium avium subsp. paratuberculosis
caggucuuccagaaggcggucgaauacuccgacgucgaccugaccuucuacgaccug

SEQ ID NO: 57214 - RNA, 71 nt, Mycobacterium bovis subsp bovis AF2122/97
caugcuggacacuucgguuaaucgucacuaacguagcacgagcuauucgauguuaacgcgagucagacaug

SEQ ID NO: 57215 - RNA, 110 nt, Mycobacterium bovis subsp bovis AF2122/97
caucgccgcgcgaacucgcaaagguagacgugucccgcauggggcggcaugaacuugccgagcaccauuccgugugucacgacgucgccucagcgauucggccggcgaug

SEQ ID NO: 57216 - RNA, 130 nt, Mycobacterium bovis subsp bovis AF2122/97
caucgccgggucgaggcgggucagcguggccagcacgcgauccauccgcgguucgcuguugguuuccacccgcagcgugucaccgucgaggaccagcguggcccggacccgcagcaugccgucguuggug

SEQ ID NO: 57217 - RNA, 56 nt, Mycobacterium bovis subsp bovis AF2122/97
cauccagcacuucuggggggauccgcugacagcggcgggaucccaaagugcggaug

SEQ ID NO: 57218 - RNA, 101 nt, Mycobacterium bovis subsp bovis AF2122/97
caucccgggcaucggcaucccgggcaucggcauccccggcguacccgacccaaucaccggggugaacaccgcugccgcggucgugaacgguguccugggug

SEQ ID NO: 57219 - RNA, 81 nt, Mycobacterium bovis subsp bovis AF2122/97
cagggaacgcagcgcggucaggucgccggucuggauggcgauguccaagcucuggauggccugccgcaccugaucuuccug

SEQ ID NO: 57220 - RNA, 87 nt, Mycobacterium bovis subsp bovis AF2122/97
cagcagggugguggugccgucgucgcgcagcccggccgcccaugagauucgcggcuccuggcgcgccacggcauccacgauucgcug

SEQ ID NO: 57221 - RNA, 56 nt, Mycobacterium bovis subsp bovis AF2122/97
caggggcucgauccggccgggccggcugcggcgcugguggaauucgagcgcuccug

SEQ ID NO: 57222 - RNA, 76 nt, Mycobacterium bovis subsp bovis AF2122/97
cagccgccgcggcagggaaaggccguggucggucuucaugauguaggccacgccgcccuugccggacugcgaguug

SEQ ID NO: 57223 - RNA, 72 nt, Mycobacterium bovis subsp bovis AF2122/97
cagcgaggucggccucccaugcggcgaucucauuguuggggcgcaggucggcguaugggaaguacccuccug

SEQ ID NO: 57224 - RNA, 115 nt, Mycobacterium bovis subsp bovis AF2122/97
cagcgcaucggaguccagaaucucucgauggcgggucaucgcacccagccgaaccagguugggauuguugauuccgccgaccacgacguagccgaguucgggggccaggucguug

SEQ ID NO: 57225 - RNA, 89 nt, Mycobacterium bovis subsp bovis AF2122/97
cagcuccgaccugauauguucaauaaaucauuauguucaauaaaacugaacguacggauauacugaacgcauggaucagaucggggcug

SEQ ID NO: 57226 - RNA, 86 nt, Mycobacterium bovis subsp bovis AF2122/97
cagcggacauguggcgcgcgcuggccaguguggcgaucagucguguguugcuccacugcugccaagucggccgucaucgucugcug

SEQ ID NO: 57227 - RNA, 58 nt, Mycobacterium bovis subsp bovis AF2122/97
cagcccggcggugcucgaggaagugcugucccguggcaugcucgaggugcugccgcug

SEQ ID NO: 57228 - RNA, 62 nt, Mycobacterium bovis subsp bovis AF2122/97
ccacaaacgagcuugucgcgugcucgaguuccuggcccaccggcagcacgagcucgucgugg

SEQ ID NO: 57229 - RNA, 62 nt, Mycobacterium bovis subsp bovis AF2122/97
cauucgcggaccaccgaucaauguccacaagguggcaggaucgggaugcguccaguucagug

SEQ ID NO: 57230 - RNA, 62 nt, Mycobacterium bovis subsp bovis AF2122/97
ccagccggugcuaucgguuucgaacgugaugugcgcguccucgaaacccagccaccucuugg

SEQ ID NO: 57231 - RNA, 84 nt, Mycobacterium bovis subsp bovis AF2122/97
ccaccgagcgggugguggucgccaacgccgaccaacugcugaucguggucgcgcuggcagacccgccgccacgcaccggccugg

SEQ ID NO: 57232 - RNA, 68 nt, Mycobacterium bovis subsp bovis AF2122/97
ccagccgccagcaucucggaucagcaacuucccgccgaagcgccacaagacccgcgugcuggcggcgg

SEQ ID NO: 57233 - RNA, 75 nt, Mycobacterium bovis subsp bovis AF2122/97
ccagcuacucggcggacaucggaugcguccggcugaccgaacgcuguuugcacuccgacccgccgacguugcagg

SEQ ID NO: 57234 - RNA, 80 nt, Mycobacterium bovis subsp bovis AF2122/97
ccaugucgagcugucggccaggguggccuggaugagugagucgcagcucgcuucugagauccuggugauugccgaccugg

SEQ ID NO: 57235 - RNA, 56 nt, Mycobacterium bovis subsp bovis AF2122/97
ccaugagcacccggauggccuggcuuagcccggucaugucguccaccggcuuaugg

SEQ ID NO: 57236 - RNA, 63 nt, Mycobacterium bovis subsp bovis AF2122/97
ccaucaccguguaguacaccguggcaucgugcaagucggcggucaccuucgcaucggugaugg

SEQ ID NO: 57237 - RNA, 67 nt, Mycobacterium bovis subsp bovis AF2122/97
augucgaccgcguuguaauaccacucugcguccucgcggcucaggcuuaugcagccguggcugacau

SEQ ID NO: 57238 - RNA, 64 nt, Mycobacterium bovis subsp bovis AF2122/97
auucgucgagcaauugcugguaugccgccgcuucuucuaacggauucagcuguacucgaugaau

SEQ ID NO: 57239 - RNA, 63 nt, Mycobacterium bovis subsp bovis AF2122/97
aguucgaggaucgagcugccaccgauccacuggaguugaaggccaaggagcacgaccucaacu

SEQ ID NO: 57240 - RNA, 61 nt, Mycobacterium bovis subsp bovis AF2122/97
aguuucuccaggguggcccgcagcgcgggggaauuccgcuugacgugaucgcugagacccu

SEQ ID NO: 57241 - RNA, 73 nt, Mycobacterium bovis subsp bovis AF2122/97
aguuugccgauuugauccagggugcgugguuggccgucauccaggccgaagcgcagccggaucaccuggugcu

SEQ ID NO: 57242 - RNA, 56 nt, Mycobacterium bovis subsp bovis AF2122/97
aucgcagccacggaguucgauuaccuggagaugugggcucaggauguggcugcgau

SEQ ID NO: 57243 - RNA, 65 nt, Mycobacterium bovis subsp bovis AF2122/97
augcauuggcgcugcaguacuuucacgcagcucccuggguugcguggucggaugcaggccagcgu

SEQ ID NO: 57244 - RNA, 60 nt, Mycobacterium bovis subsp bovis AF2122/97
caaaggccuuuccugcugggcuguguugaggucgcaaacccagccaggguaaggccuuug

SEQ ID NO: 57245 - RNA, 100 nt, Mycobacterium bovis subsp bovis AF2122/97
cagagcgcuggccgcggcgccuggcgcgcagcacggccugcagugcgucgcgggcacgcgcugugauuggcgcgaccacgccgcggucgguagagcucug

SEQ ID NO: 57246 - RNA, 97 nt, Mycobacterium bovis subsp bovis AF2122/97
cacgaucucgguuucggacggcaucuccaugggucaugaggggaugcacuucucgcugguuucccgugaggugaucgccgacagcgucgaagucgug

SEQ ID NO: 57247 - RNA, 67 nt, Mycobacterium bovis subsp bovis AF2122/97
caccagcucaucgccguagcugaggaccgcgaccccggugcucagcugcagugcggugggcgggaug

SEQ ID NO: 57248 - RNA, 76 nt, Mycobacterium bovis subsp bovis AF2122/97
caccaucuuugauauccgcaaccugcgguugccgcagcugucgcgggccucgguugucaucggaucguugguggug

SEQ ID NO: 57249 - RNA, 57 nt, Mycobacterium bovis subsp bovis AF2122/97
caccagggugcugccggugauuucgaugcuguaggagaagccgaccagcccguggug

SEQ ID NO: 57250 - RNA, 67 nt, Mycobacterium bovis subsp bovis AF2122/97
caccgagugcucgucguccugcucgacgaucuugaugacguugaucagcuuguugagcugcuuggug

SEQ ID NO: 57251 - RNA, 85 nt, Mycobacterium bovis subsp bovis AF2122/97
agccaucgggaaauguccauggggucagucuugcgcagcggcauccuguugcgccagcgccucccgcaggauccguccgguggcu

SEQ ID NO: 57252 - RNA, 55 nt, Mycobacterium bovis subsp bovis AF2122/97
agccgggcaucuggaaguggcucaaaaucaggugcagcgacuucauggccugguu

SEQ ID NO: 57253 - RNA, 82 nt, Mycobacterium bovis subsp bovis AF2122/97
agccuaauucgccgagcagacgcaaaagcgcccaggucugcccgaaaaggggagcuuuuaugacugcucggcgggaaggguu

SEQ ID NO: 57254 - RNA, 113 nt, Mycobacterium bovis subsp bovis AF2122/97
agugggugaaccggaccuggguggcgucgcgguuguggcugaucccggccaggccgacaaugucggcgaugcguccgcccagccgcagcaccucggucccguugccgcccacu

SEQ ID NO: 57255 - RNA, 61 nt, Mycobacterium bovis subsp bovis AF2122/97
accagcaccggccgcugcggcagccacgacaguugccgccaccaggcagccggugccaggu

SEQ ID NO: 57256 - RNA, 58 nt, Mycobacterium bovis subsp bovis AF2122/97
acaccaagcgcccgcagcuugcccaacgguggcugggccaagcugacggccuuggugu

SEQ ID NO: 57257 - RNA, 58 nt, Mycobacterium bovis subsp bovis AF2122/97
acacccaggggcugccgcagcgaauagacgucgaugccggggccggcacccucggugu

SEQ ID NO: 57258 - RNA, 63 nt, Mycobacterium bovis subsp bovis AF2122/97
acccagaggcuguugccgacgcgaugaacaugauugacugauuggcggucgcagcuucugugu

SEQ ID NO: 57259 - RNA, 70 nt, Mycobacterium bovis subsp bovis AF2122/97
accgguacugacaagcccggcgcggugcugguguuuccacacgccggcggcgcugccgcggcuuaccggu

SEQ ID NO: 57260 - RNA, 127 nt, Mycobacterium bovis subsp bovis AF2122/97
accuccauucgggguccguucgaaaugcuugucggguuguucaacgccgucaauguugagucuguuccgcucaauuuuacccacuugugcauccgccgccguuucgccgcgagcuuagaaucgaggu

SEQ ID NO: 57261 - RNA, 64 nt, Mycobacterium bovis subsp bovis AF2122/97
accucuggggcgcguucggacugcucgccgagauggucaagcagggccgcagcggcucgguggu

SEQ ID NO: 57262 - RNA, 62 nt, Mycobacterium bovis subsp bovis AF2122/97
acgcuguuggggccaacgaaguaugcgcgggugauccgccagaacugccggccccagggcgu

SEQ ID NO: 57263 - RNA, 78 nt, Mycobacterium bovis subsp bovis AF2122/97
acgucgcacccacuggcgggcgauccgcggagaggacuucaaauggguugucccgcacucgauccgcaaguccgucgu

SEQ ID NO: 57264 - RNA, 82 nt, Mycobacterium bovis subsp bovis AF2122/97
acgauuguguuugcgccgucuggcagccuggcgaugagcucguccacccgcgccagccggacggcuugcgcaaacugaucgu

SEQ ID NO: 57265 - RNA, 130 nt, Mycobacterium bovis subsp bovis AF2122/97
aauacgacggccgcgcggucgccggguuuucgauggguggcuucggcgcgcugaaguacgcagcaaaguacuacggccacuucgcgucggcgagcagccacuccggaccggcaagucugcgccgcgacuu

SEQ ID NO: 57266 - RNA, 83 nt, Mycobacterium bovis subsp bovis AF2122/97
aacucguugacaguggccaaggccaggucggccgcuccaagcgcggcaagcaacggagccuugaugucaucaauguucgaguu

SEQ ID NO: 57267 - RNA, 87 nt, Mycobacterium bovis subsp bovis AF2122/97
gaacuaaaccuacaccuggcgugcuaucgcgcauucgacgacauuggcagcgugauccacagccacccggugugggcgaccauguuc

SEQ ID NO: 57268 - RNA, 126 nt, Mycobacterium bovis subsp bovis AF2122/97
gaagaccgagccggcggcgaauuuguagaugucgcguuugcgcaggggcaugucagcguaugugcucgacgcgacgaauccacugcgcuugacgaggcgguacgucgcgccggcgagugcggcuuc

SEQ ID NO: 57269 - RNA, 57 nt, Mycobacterium bovis subsp bovis AF2122/97
gaagcugcugggccaguucguggauucgcuagaagccgagcucgcggcccagaguuc

SEQ ID NO: 57270 - RNA, 75 nt, Mycobacterium bovis subsp bovis AF2122/97
gaagccagugugaccgccuggauaccacacgauuucggguuugccccagugcucccagaggcgagucaccuguuc

SEQ ID NO: 57271 - RNA, 57 nt, Mycobacterium bovis subsp bovis AF2122/97
cuugggcguuugcguucgccgcgaccgcguugugcguaggcgaucgccucguccaag

SEQ ID NO: 57272 - RNA, 78 nt, Mycobacterium bovis subsp bovis AF2122/97
cuugugccgccgaacagacacaaaaccacccuauuucgaccagaaucgggugcuuuugcgucugcucggccaacuaag

SEQ ID NO: 57273 - RNA, 83 nt, Mycobacterium bovis subsp bovis AF2122/97
cuuugagcucuaggccaauguuguuccgcaugccgccgcgcagcuuacugacgaaggugaacagcuugcccuggaugccguag

SEQ ID NO: 57274 - RNA, 79 nt, Mycobacterium bovis subsp bovis AF2122/97
cuugcaauucuagguucgguuacuaagggccagcgcggcacgcaaacuguugcacugacuagugaagaaccuuugugag

SEQ ID NO: 57275 - RNA, 59 nt, Mycobacterium bovis subsp bovis AF2122/97
gacgaauuggccaggcugacagaggcauucaauuuaaugcugcgggcgcuggccgaguc

SEQ ID NO: 57276 - RNA, 112 nt, Mycobacterium bovis subsp bovis AF2122/97
gaccacucgugaaccggcgacgggcagcagucgaucaaucaacaggccggucaacgcgaaauggcccaagugguuggugccgaacugcaucucgaagccgucugcugugguc

SEQ ID NO: 57277 - RNA, 72 nt, Mycobacterium bovis subsp bovis AF2122/97
gacaggcugacguucugcacgcucgggccggccgcgacgaucgugguguccugcaggaucggcaacacgguc

SEQ ID NO: 57278 - RNA, 92 nt, Mycobacterium bovis subsp bovis AF2122/97
gacagcagcgccacuucgucaaggugaugccgcgugacuacaaacggguccugcaggcgaucgcccuggcugaacgugacggcguugauguc

SEQ ID NO: 57279 - RNA, 67 nt, Mycobacterium bovis subsp bovis AF2122/97
gacggcgcgccuugucgagaucgucgccgugggugacaccgacgaacgcgaccaggcccugcccguc

SEQ ID NO: 57280 - RNA, 75 nt, Mycobacterium bovis subsp bovis AF2122/97
gacugauagacguccauaucgccaugccuggccugcagaucgaccgccagagcaugggcguggacguugucgguc

SEQ ID NO: 57281 - RNA, 69 nt, Mycobacterium bovis subsp bovis AF2122/97
gacgcauggccaaccucccgacugguacccgcgccggcucgguuacgccgguugugguuggccgugcuc

SEQ ID NO: 57282 - RNA, 56 nt, Mycobacterium bovis subsp bovis AF2122/97
gagcagacgcagaagucgccgauuucaccggaaaucggggacuucugcgucugcuc

SEQ ID NO: 57283 - RNA, 79 nt, Mycobacterium bovis subsp bovis AF2122/97
cucuccaggcgaaucaccccgccgcgcgcggugaccguucgucggccggguguuggugagggugacucgccgaggaggg

SEQ ID NO: 57284 - RNA, 128 nt, Mycobacterium bovis subsp bovis AF2122/97
cucguucgguggaaaaguccaggaaccgguaggccagcuugucgccacgaaccuucgcccacuuuucgacgugacgaaccagguugguguuggcugggaaccugaucuuuccauucacgaugaacggg

SEQ ID NO: 57285 - RNA, 96 nt, Mycobacterium bovis subsp bovis AF2122/97
cugcuggccgccugcguccggucgcgggcugacuccggucaccaggagcgugccgcuggccagaucuccccgcgggccgcgcgggauaagccgcgg

SEQ ID NO: 57286 - RNA, 94 nt, Mycobacterium bovis subsp bovis AF2122/97
cugcucgcguugcugacauccaggcgaccggccgggguacccgacuugcggcgacuguucccgaccggcuuugacgagcagcggcgcgcggcgg

SEQ ID NO: 57287 - RNA, 88 nt, Mycobacterium bovis subsp bovis AF2122/97
cugcgaguugauguccucaagccggcguuccagcucgggcaccaaaugcugugcucgaacccggguuucggcgaaugacaacuugcag

SEQ ID NO: 57288 - RNA, 75 nt, Mycobacterium bovis subsp bovis AF2122/97
cugcgcaccgcggcggcgcuggcucgguugaaucagcguaacggcuucgacugcccaggcugcgcguggccggag

SEQ ID NO: 57289 - RNA, 63 nt, Mycobacterium bovis subsp bovis AF2122/97
cugguugugccgauagccgugaagcccuccgcgagguaggccagggccgacggcacaucccag

SEQ ID NO: 57290 - RNA, 75 nt, Mycobacterium bovis subsp bovis AF2122/97
cugguagucaccgccgcgguuggugcgcauggugcgccgugcgaucuggacggcggcggucaccgcgaucaucag

SEQ ID NO: 57291 - RNA, 74 nt, Mycobacterium bovis subsp bovis AF2122/97
cuccaagggcaagccgauggccgcggacgccgaccucgacggacuggccaagcggaccgucggcaugaccggag

SEQ ID NO: 57292 - RNA, 64 nt, Mycobacterium bovis subsp bovis AF2122/97
cgucggccgcguguucgacugggugguggccgagcuggucgccaccacucaggccgcggucacg

SEQ ID NO: 57293 - RNA, 120 nt, Mycobacterium bovis subsp bovis AF2122/97
cguccuuguaguagccgacgggaauguugcccuucuuggcgagcgugcgcgcgggucgcacugcuuggcgccuggugcaccggucgccgggcggcuccuccccagggcgcuccagguucg

SEQ ID NO: 57294 - RNA, 77 nt, Mycobacterium bovis subsp bovis AF2122/97
cgucaaagguuuucagcguguaggagguguaguacuugaacgcacccaaaaacgucggaaaccggaacuuuuuggcg

SEQ ID NO: 57295 - RNA, 88 nt, Mycobacterium bovis subsp bovis AF2122/97
cgugcggaacugagcggcgaaggugagcuggggauccaccggcgccugaucgagccccagucgcuuugucucgagguugaucuccacg

SEQ ID NO: 57296 - RNA, 79 nt, Mycobacterium bovis subsp bovis AF2122/97
cgucuacgaagauccgcccgcggcccugcaccucgaguccggcguugugcaggucgagguggucgguuugucccugacg

SEQ ID NO: 57297 - RNA, 82 nt, Mycobacterium bovis subsp bovis AF2122/97
cguucucgcgcaggaugaggcuugccaccgucgccgcggagaccagggcaucggugccggccuuuccggagcgcagcgagcg

SEQ ID NO: 57298 - RNA, 114 nt, Mycobacterium bovis subsp bovis AF2122/97
cguugaagaaggccacggcgaucacgccggggcuggagucaccgaccaucgccccgcuggccgacccggacuggguggcaauccgcgcccuggugccgcgccgggacgucaacg

SEQ ID NO: 57299 - RNA, 66 nt, Mycobacterium bovis subsp bovis AF2122/97
cguucagcacggccgacagcgagaaccugcaaaucccgcaguacaagcauucggucgugaugggcg

SEQ ID NO: 57300 - RNA, 113 nt, Mycobacterium bovis subsp bovis AF2122/97
ccgcccgcgcucggcgccgugcuacccgcccggggcauggccaagcuggcuuucgaugugaccccgccggccuggcuggagcccgggcaguggugggcccugguucgggucgg

SEQ ID NO: 57301 - RNA, 69 nt, Mycobacterium bovis subsp bovis AF2122/97
ccgccgagguaggucagggcguauuugucguagcggguugcgaugccgcgccacugcuugagucgaugg

SEQ ID NO: 57302 - RNA, 89 nt, Mycobacterium bovis subsp bovis AF2122/97
ccgagccgccgccgcggacugucccgagcgcaccaggaaucgaaccaggcuuccuugugucaucgggcaggucgcaaauccggugucgg

SEQ ID NO: 57303 - RNA, 57 nt, Mycobacterium bovis subsp bovis AF2122/97
cccgggccuguucgggugacagguacugcgccgugccgaucacugcugcggucuggg

SEQ ID NO: 57304 - RNA, 91 nt, Mycobacterium bovis subsp bovis AF2122/97
cccgcuuggccgggcgaucgucgcggaagcucgucggcgugguaucgccauaccgcccgccaaggacuuccgcgcggucccgggcugcggg

SEQ ID NO: 57305 - RNA, 56 nt, Mycobacterium bovis subsp bovis AF2122/97
cccgauccacggugaccaggggugccuugaucaacugcuggugcaccuuguuuggg

SEQ ID NO: 57306 - RNA, 115 nt, Mycobacterium bovis subsp bovis AF2122/97
cccgcaggccgacuucggcguguccggugcccagcaccgaccagugccggccgccgagcucgauguggaugucggcuugcucgguguuggugcacaccgccuuggccccgucggg

SEQ ID NO: 57307 - RNA, 78 nt, Mycobacterium bovis subsp bovis AF2122/97
cccgcgccaccgccgggacaagauccgcacaugccgaauagugcgaugggauauugcccuggcgguggcuuugguggg

SEQ ID NO: 57308 - RNA, 88 nt, Mycobacterium bovis subsp bovis AF2122/97
ccggcgaucgucaaguuucucagcgagcaggugcuuucccgcgcgacggagcgagugcgugcugggguacucggcgaaauacguucgg

SEQ ID NO: 57309 - RNA, 100 nt, Mycobacterium bovis subsp bovis AF2122/97
ccggugaccgcgacggguuugguguccgcacugcugcucaccacccgcggcaccgcguugacgcucgaccagcugcaccacacguugcaggacucacugg

SEQ ID NO: 57310 - RNA, 91 nt, Mycobacterium bovis subsp bovis AF2122/97
ccggcgacggcaucgcccugggauugugggcgggcgucgcggucagcgaucucgaguucauccaguuccaccccacgaugcuuuuugccgg

SEQ ID NO: 57311 - RNA, 84 nt, Mycobacterium bovis subsp bovis AF2122/97
ccgcgcgucgggaagggcuacaccucgacgaggccgacgacgaguucucgacggccgaacguguggaguccgcccugcgcacgg

SEQ ID NO: 57312 - RNA, 72 nt, Mycobacterium bovis subsp bovis AF2122/97
ccgcgaacuggccagcccgcacaaccacuaugugggugcgcgcagcgguggcacgcuggucgguuacgccgg

SEQ ID NO: 57313 - RNA, 69 nt, Mycobacterium bovis subsp bovis AF2122/97
ccgcuucaucgucguggcagguguugggcugauuuuggucaacccagcaccugccaggacgggcuacgg

SEQ ID NO: 57314 - RNA, 71 nt, Mycobacterium bovis subsp bovis AF2122/97
ccggaucccucagcugucaugguuggugauugucccagaagccgaaccgugcgcuggagcugggauacugg

SEQ ID NO: 57315 - RNA, 102 nt, Mycobacterium bovis subsp bovis AF2122/97
ccggccagaacugcucgggcgugaacaggccuugcgagacagcacccgggaagagggucuggaugaaagccuuguugaugucugucacguacucggggucgg

SEQ ID NO: 57316 - RNA, 79 nt, Mycobacterium bovis subsp bovis AF2122/97
ccuggaaaauauucaucgaguacagcugaauccguuagaagaagcggcggcauaccagcaauugcucgacgaauucggg

SEQ ID NO: 57317 - RNA, 87 nt, Mycobacterium bovis subsp bovis AF2122/97
ccggugcccggaucucugcgggguaguucggcugggucgccagaucguugccgaaaagcgcugccuccgaggugaaucggucgccgg

SEQ ID NO: 57318 - RNA, 73 nt, Mycobacterium bovis subsp bovis AF2122/97
ccggugucgaaacugcaaccacgcaccgaugcgucggcgugucuugugcgugguugcagugucgcgaagccgg

SEQ ID NO: 57319 - RNA, 87 nt, Mycobacterium bovis subsp bovis AF2122/97
ccguggugcgugauggcgaggcggcgcgccgccaccugcuggaagcaaaccugcggcuggugguaucgcuggccaagcgcuacacgg

SEQ ID NO: 57320 - RNA, 71 nt, Mycobacterium bovis subsp bovis AF2122/97
ccguuccucgacggcgcgugugucaacgacccugaccauagcuggguggcgaugcaugagucguggaaugg

SEQ ID NO: 57321 - RNA, 72 nt, Mycobacterium bovis subsp bovis AF2122/97
ccucgaagccgcacuacggucaaugcgcugcgcucgcagugaaauugaaaacgccguugcugagcagcgagg

SEQ ID NO: 57322 - RNA, 83 nt, Mycobacterium bovis subsp bovis AF2122/97
cgaacccgacgaagcggccgucgaacauggcggccugauacaccaccggggcgugguuggcgauggcacgucgcgucgcgucg

SEQ ID NO: 57323 - RNA, 71 nt, Mycobacterium bovis subsp bovis AF2122/97
cgaagaaguccagcagaucgaucucgccggccucaccccagucggcgaucauccgucggacuugaucuucg

SEQ ID NO: 57324 - RNA, 77 nt, Mycobacterium bovis subsp bovis AF2122/97
ccuuuugaucacccccuugaccuugcaccauggcgucugaaaacggaacaucgguagccgucaaauugaccagaagg

SEQ ID NO: 57325 - RNA, 59 nt, Mycobacterium bovis subsp bovis AF2122/97
ccugggacagcuggaaguuaucggacgcggccguguucauaccgaccaccuguccuagg

SEQ ID NO: 57326 - RNA, 65 nt, Mycobacterium bovis subsp bovis AF2122/97
cgacggucagcuguguccgcacaaccgggcacccucggugacggacugcacagcgauggaccgcg

SEQ ID NO: 57327 - RNA, 76 nt, Mycobacterium bovis subsp bovis AF2122/97
cgacgucuugcccaagcccggcggaccggacagcagaaugugauccggugugccgccgcgguuuuuggcucccucg

SEQ ID NO: 57328 - RNA, 73 nt, Mycobacterium bovis subsp bovis AF2122/97
cgacgacaacccgaugcccggcgggauguaccgcaaccaagugugguuucccuacccgggcagcaaugucgcg

SEQ ID NO: 57329 - RNA, 80 nt, Mycobacterium bovis subsp bovis AF2122/97
cgacgacgaguacaccaaggccgucagcuuggcccagccaccguugggcaagcugcgggcgcuuggugucaaucccgacg

SEQ ID NO: 57330 - RNA, 78 nt, Mycobacterium bovis subsp bovis AF2122/97
cgacacccugcucgucaugucgguagagccuggcuucgguggccagcgguucauucccgaggugcugagcaaggugcg

SEQ ID NO: 57331 - RNA, 118 nt, Mycobacterium bovis subsp bovis AF2122/97
cgacaggucccgggugugcgaauccgggugguccagcagcgcguacagcaucgauggcaccaacauggucgcuguaaugcguugcuccucaaugauucugaguaccucggccgggucg

SEQ ID NO: 57332 - RNA, 77 nt, Mycobacterium bovis subsp bovis AF2122/97
cgccgacgucccauaaccgcugcccgggccuuggcgccagcgcagccagggucagcacgcggauuggguguuuggug

SEQ ID NO: 57333 - RNA, 67 nt, Mycobacterium bovis subsp bovis AF2122/97
cgcccacugggggccggcugcgguagcagcguuggauagcgcgcugcgucgggccucggaauggucg

SEQ ID NO: 57334 - RNA, 75 nt, Mycobacterium bovis subsp bovis AF2122/97
cgccauucggacucguugccgucccgggugcuccgucgccgauuagcggacgccccaacaacguuucgguuggug

SEQ ID NO: 57335 - RNA, 99 nt, Mycobacterium bovis subsp bovis AF2122/97
cgccagagacacggaucgcgcgucucggcgaguggggcgcagucgggcuauauguuucauucagacgagaggcgugaacacccugaaaucucuaggacg

SEQ ID NO: 57336 - RNA, 56 nt, Mycobacterium bovis subsp bovis AF2122/97
cgccagcaccaucugcgaucccggcuuccuggugcuggucgaaggugugcucggcg

SEQ ID NO: 57337 - RNA, 66 nt, Mycobacterium bovis subsp bovis AF2122/97
cgaugcggccggguccacccggcugaucuucacgcgccaggaaggucugucggaccuggccgcgcg

SEQ ID NO: 57338 - RNA, 61 nt, Mycobacterium bovis subsp bovis AF2122/97
cgaugagucggcagguggcugucagagcuuguugagcgccugggccagugccgacuucuug

SEQ ID NO: 57339 - RNA, 64 nt, Mycobacterium bovis subsp bovis AF2122/97
cgagguacuccagugcgucggucuggaaucgacgauccagccaagacgcgucggggccaccccg

SEQ ID NO: 57340 - RNA, 65 nt, Mycobacterium bovis subsp bovis AF2122/97
cgauccgcugacuccgauccuggcggugggcgccgcagcaucggcgauugucggcagcaauaucg

SEQ ID NO: 57341 - RNA, 67 nt, Mycobacterium bovis subsp bovis AF2122/97
cgcgcuaggggucgcgcugcagcgcgccgaccauguugugguggcgugcagcgccaucucucaugcg

SEQ ID NO: 57342 - RNA, 77 nt, Mycobacterium bovis subsp bovis AF2122/97
cgcgcucacccgcgccgggauagucaccgcggccgaugcgcgggccgcgguggcagaaaguccggagcaguagcgug

SEQ ID NO: 57343 - RNA, 76 nt, Mycobacterium bovis subsp bovis AF2122/97
cgccgccgcgcacgccgccuggcgugguguccgcaccguugaggagcaggauauccaggcggcagcagaacuggcg

SEQ ID NO: 57344 - RNA, 77 nt, Mycobacterium bovis subsp bovis AF2122/97
cgcgguggccagggcugccacagucgccugggcgcccuuguccucggccgacgucgguagccccgcccgauccagcg

SEQ ID NO: 57345 - RNA, 80 nt, Mycobacterium bovis subsp bovis AF2122/97
cgcgugcugggcgagcagacacagagucgcaucaaaaccgccgauuuugugcgacucugugucugcucgcggggugcgcg

SEQ ID NO: 57346 - RNA, 100 nt, Mycobacterium bovis subsp bovis AF2122/97
cgcgaucaauaacggugcgacggugcugguggucagugacgccgggaccccggugaucagcgaucccggcuaucggcuggucgcggcgugcaucgacgcg

SEQ ID NO: 57347 - RNA, 65 nt, Mycobacterium bovis subsp bovis AF2122/97
cgcucuggccgggcggcauggagaucacccaguuggucuugaugccuccgcgagccgccgagaug

SEQ ID NO: 57348 - RNA, 61 nt, Mycobacterium bovis subsp bovis AF2122/97
cgcugggucuccggcggcucgguagcaacguauuccgaagcaaugcgcacggcauccagcg

SEQ ID NO: 57349 - RNA, 84 nt, Mycobacterium bovis subsp bovis AF2122/97
cggcagcucccaacgguggccccggcgguuugcuauucggugacgguggggccggcuauaccggcgguaacggugggagugccg

SEQ ID NO: 57350 - RNA, 92 nt, Mycobacterium bovis subsp bovis AF2122/97
cggccauggcuggcagcaucgaccugccgcagcguugcuauuccggauuggaacugcgcgacgaccggcugguguugagcccgcaauggccg

SEQ ID NO: 57351 - RNA, 60 nt, Mycobacterium bovis subsp bovis AF2122/97
cggccagcacgucacgcaggccgauauucgagucgaaccgucgccgugacguguugaacg

SEQ ID NO: 57352 - RNA, 83 nt, Mycobacterium bovis subsp bovis AF2122/97
cggacgcgguaccgauauuggccaagaagcugaagcccauccggucaacacaguccugggccaacugccgguagaccuguucg

SEQ ID NO: 57353 - RNA, 69 nt, Mycobacterium bovis subsp bovis AF2122/97
cggagagcguggcaucgcucggaagguauugggauuccaaauauuucguggcgaugcgcuugguuuccg

SEQ ID NO: 57354 - RNA, 128 nt, Mycobacterium bovis subsp bovis AF2122/97
cgcuuguuccgccugcgcugccgccgugcugagccaggcuagguacuggguugcgacggccaucaucgccgccgcggacggacccagccaggcgccacuagucaguucggaugugacggagccaagcg

SEQ ID NO: 57355 - RNA, 66 nt, Mycobacterium bovis subsp bovis AF2122/97
cggcgagcagacgcaaaacccccuucucgucggcgugucgagggacuuaugcgucugcuagcgccg

SEQ ID NO: 57356 - RNA, 61 nt, Mycobacterium bovis subsp bovis AF2122/97
cggccugucucggcaagccuggucgaccccgaggaugaccugacgccggccagauaugccg

SEQ ID NO: 57357 - RNA, 100 nt, Mycobacterium bovis subsp bovis AF2122/97
cggccuuucgguuguggggguggcgccgugaccgaccuggccggcaccacccggcugcugcgcgcucagggcgucaccgccccggccggcuuucgggccg

SEQ ID NO: 57358 - RNA, 92 nt, Mycobacterium bovis subsp bovis AF2122/97
cggccugcgcaucgaagaugguuugcugaagaagcugggugccgaggcgguggcucagcgggucaacgaggcgcugcacaaugcgcaggccg

SEQ ID NO: 57359 - RNA, 72 nt, Mycobacterium bovis subsp bovis AF2122/97
cggccucuaccagccggcgcagcagcgccuuuucggcaacgaugcucgcguaguagcccgcguuggcggccg

SEQ ID NO: 57360 - RNA, 72 nt, Mycobacterium bovis subsp bovis AF2122/97
cggccggguccaagcagcgacuagucaaguuggggccggaaggauuugcucguuggcugcgggagucggccg

SEQ ID NO: 57361 - RNA, 86 nt, Mycobacterium bovis subsp bovis AF2122/97
cggcgaucaccagccggcgcauggucaaagcgccgcuccuucuggucgcucugcucugcaucgucgccggcgcggucaaagcgccg

SEQ ID NO: 57362 - RNA, 80 nt, Mycobacterium bovis subsp bovis AF2122/97
cggcggcacagccaacagccagcugcccgguccgccgagccggucgugggcggccgaggcgcuggcggucaaggccgccg

SEQ ID NO: 57363 - RNA, 62 nt, Mycobacterium bovis subsp bovis AF2122/97
cgggucuauggguggaugcucgacggcguuccggugguggcgaugcaccgcaauaugaccug

SEQ ID NO: 57364 - RNA, 59 nt, Mycobacterium bovis subsp bovis AF2122/97
cggggcugccggugagugcgcgauaggugcucgcgaucugcucguagcggcggcgcccg

SEQ ID NO: 57365 - RNA, 56 nt, Mycobacterium bovis subsp bovis AF2122/97
cggguggugcgggcagccgaccggagaugaaagccguugguggacagcgcuucccg

SEQ ID NO: 57366 - RNA, 126 nt, Mycobacterium bovis subsp bovis AF2122/97
cggugaugcugugacggaucggcgggccaacacgaggaauucgcacccgcugccggcgugaccaacgccacgcuggcagcaaucggguauccgaucgcguuggccagcaagcuguuggcgauaucg

SEQ ID NO: 57367 - RNA, 64 nt, Mycobacterium bovis subsp bovis AF2122/97
cggucgccgcggucgugcugggugcgaugaucugguccgcacaccgcgaugacuccggcgagcg

SEQ ID NO: 57368 - RNA, 65 nt, Mycobacterium bovis subsp bovis AF2122/97
cgggcgggcccggagggccagagggcacauagcugcccuccucguggcgagccgggccacgcccg

SEQ ID NO: 57369 - RNA, 60 nt, Mycobacterium bovis subsp bovis AF2122/97
cggggaucggcacccuggccgcaugguucgccgcggccggagagguugucguguuccucg

SEQ ID NO: 57370 - RNA, 107 nt, Mycobacterium bovis subsp bovis AF2122/97
cggggauguccuacguguggugggcgcuggcggucaucgucguugccggacucaccguuaccgccaggaugacgccgcagcgcucgcuuacgcgcggacugaccccg

SEQ ID NO: 57371 - RNA, 65 nt, Mycobacterium bovis subsp bovis AF2122/97
cgggcguggcccggcucgccacgaggagggcagcuaugugcccucuggcccuccgggcccgcccg

SEQ ID NO: 57372 - RNA, 99 nt, Mycobacterium bovis subsp bovis AF2122/97
cggcggugaccagcaccacgccgaugaaaccgguggccaugccgccugcgaagacccgccaggugcgcgcgaucuggaucauuugcgucggucccuccg

SEQ ID NO: 57373 - RNA, 104 nt, Mycobacterium bovis subsp bovis AF2122/97
cggcguggucggcggcgucguuggcggcguggucaccggcguggucggcggcgucguuggcggcguggucaccggcguggucggcggcguggucggcggcgucg

SEQ ID NO: 57374 - RNA, 63 nt, Mycobacterium bovis subsp bovis AF2122/97
cggcugcagugcgacgacgagaaaccggcggcaauaguggccaucucuccguugcugcagcug

SEQ ID NO: 57375 - RNA, 59 nt, Mycobacterium bovis subsp bovis AF2122/97
cggcuggccagggcguuuccgcucuacgacgggcucgaggaguggagucuggucggccg

SEQ ID NO: 57376 - RNA, 55 nt, Mycobacterium bovis subsp bovis AF2122/97
cgggcacggaucgugauuacgcauagcguguaaaagaacuuugcauccgugcccg

SEQ ID NO: 57377 - RNA, 57 nt, Mycobacterium bovis subsp bovis AF2122/97
gcacgcgagcuggguuuagaacgucgugagacaguucggucucuauccgccgcgcgc

SEQ ID NO: 57378 - RNA, 58 nt, Mycobacterium bovis subsp bovis AF2122/97
gcacggguucguugcugugcaugugcucgcaguaccggcgcagcaucucagccagugc

SEQ ID NO: 57379 - RNA, 61 nt, Mycobacterium bovis subsp bovis AF2122/97
gcagaugagugcagaggaucucgaaaaguaugaaaccgagauggagcucucgcuguaucgc

SEQ ID NO: 57380 - RNA, 60 nt, Mycobacterium bovis subsp bovis AF2122/97
gcacgucguaucuggacaaccgggcgaucgacaccgcccagauccagccguacgacgggc

SEQ ID NO: 57381 - RNA, 62 nt, Mycobacterium bovis subsp bovis AF2122/97
gcacgucgucgcgggacagguaccgcgcccgcagcgcggcgauuugcaacgcaacggcgugc

SEQ ID NO: 57382 - RNA, 71 nt, Mycobacterium bovis subsp bovis AF2122/97
gcagcuggccugcgcggguggcuuuccggaaguugugcagcgcccggcgggucgcgcccgcagccgguggu

SEQ ID NO: 57383 - RNA, 76 nt, Mycobacterium bovis subsp bovis AF2122/97
gauguugucgauucaccagcggccguucgaucccgccgaccgcuccgagccuggccacugggaaggagaucucauc

SEQ ID NO: 57384 - RNA, 108 nt, Mycobacterium bovis subsp bovis AF2122/97
gaugcacaagucaaaaccgcguuggcguuuguccaaguaguaggcgagaucaccggcgauauaugccgguuugccgucgcucuugaucacgacgcgguccuugucguc

SEQ ID NO: 57385 - RNA, 69 nt, Mycobacterium bovis subsp bovis AF2122/97
gaugcacccagugagguuucaucgaucggccugcucaccuuguagcaggcggcuucacugauguugauc

SEQ ID NO: 57386 - RNA, 61 nt, Mycobacterium bovis subsp bovis AF2122/97
gaugcugcucggacccagcggcugcggcaagacgacacugcuuuccugucugggcggcauu

SEQ ID NO: 57387 - RNA, 57 nt, Mycobacterium bovis subsp bovis AF2122/97
gaugcuggagguguugagcaccgcuucuaacgaucccgaugcgcgccgccagcuauc

SEQ ID NO: 57388 - RNA, 79 nt, Mycobacterium bovis subsp bovis AF2122/97
gaucuucgaccaaggggagaagcagcugaaguuggcgcuugagcaucgccggcaacaccuuucccccuucgagcagauc

SEQ ID NO: 57389 - RNA, 70 nt, Mycobacterium bovis subsp bovis AF2122/97
gauucgccgucauggguuggcuaccuccuguugaacccaaccgauauccgccaacucaggcggacgaauc

SEQ ID NO: 57390 - RNA, 79 nt, Mycobacterium bovis subsp bovis AF2122/97
gauacgcagacacggcggugacgcgagaauauaauugacuccacgucauucggucaauuuggucgccgguuuuuguguc

SEQ ID NO: 57391 - RNA, 92 nt, Mycobacterium bovis subsp bovis AF2122/97
gaguucgcguagaauagcgaaacacgggaucgggcgaguucgaccuuccgucggucucgcccuuucucguguuuauacguuugagcgcacuc

SEQ ID NO: 57392 - RNA, 73 nt, Mycobacterium bovis subsp bovis AF2122/97
gaggucgauggcgaugcgcaccccgucgcgcaucgucacauagcacgaggaguagcgcaucccacgauaucuc

SEQ ID NO: 57393 - RNA, 69 nt, Mycobacterium bovis subsp bovis AF2122/97
gaucgaggcaccaggugcauugugcaccacauucuggcgauguuggugagguuuguuccugcgcccguc

SEQ ID NO: 57394 - RNA, 59 nt, Mycobacterium bovis subsp bovis AF2122/97
gauccgcccaggcucccgcucgacgacggcaccgucgugaucgugugccucggcugguc

SEQ ID NO: 57395 - RNA, 66 nt, Mycobacterium bovis subsp bovis AF2122/97
gauccggaggggcagcucggcuccgcgucgcgcgcgcgauucggcgauguguugccguucuugguc

SEQ ID NO: 57396 - RNA, 88 nt, Mycobacterium bovis subsp bovis AF2122/97
gagcucaacuagcugcuagguugccgcacuagacugcugcaaaugcaggucuauacgucggcaacgcacuggggcguguucaccgcuc

SEQ ID NO: 57397 - RNA, 68 nt, Mycobacterium bovis subsp bovis AF2122/97
gaggauaccccgggcggugucgagaacgcggccagaguucgagccgcucgagauugcagcgggcccuc

SEQ ID NO: 57398 - RNA, 64 nt, Mycobacterium bovis subsp bovis AF2122/97
gcaggcuuccagccacagcccggcggcggucugagacucgucgaugcggugguaggacgccagc

SEQ ID NO: 57399 - RNA, 73 nt, Mycobacterium bovis subsp bovis AF2122/97
gcaugacuuccagcaacgccgacugcaccuucgccggagcccgguugaucucgucggcgagcaggaaguuggc

SEQ ID NO: 57400 - RNA, 77 nt, Mycobacterium bovis subsp bovis AF2122/97
gccaccgcacaccacgucggggugaaauucuccaccaacgggguccggaucacccccgagguggccacgcggcuggc

SEQ ID NO: 57401 - RNA, 59 nt, Mycobacterium bovis subsp bovis AF2122/97
gccaaaucgagccgagagugggcgacccggaagggcccacacuccuggcuggauucggc

SEQ ID NO: 57402 - RNA, 103 nt, Mycobacterium bovis subsp bovis AF2122/97
gcauugugguggaugaucggccuguuggucgccgccggcgugcugggucugauggugguguugccgaucgguggcgccgacaugccgguggucaucucgaugc

SEQ ID NO: 57403 - RNA, 68 nt, Mycobacterium bovis subsp bovis AF2122/97
gccaagucgucggcccggucgcgggcaccggccuugccggccuugacgagcgggccggcaaucugggc

SEQ ID NO: 57404 - RNA, 83 nt, Mycobacterium bovis subsp bovis AF2122/97
gcccccuggguggucagcgucgaugaccaugucgaccccacgguguggucgauggugaugacgcuggcgcuggacugcggggc

SEQ ID NO: 57405 - RNA, 74 nt, Mycobacterium bovis subsp bovis AF2122/97
gcccggccagcgcgaugcggaacgcggugucggcggcgcuguugaugaugcggauccggauucgcuggccaggc

SEQ ID NO: 57406 - RNA, 63 nt, Mycobacterium bovis subsp bovis AF2122/97
gcccagagugcgcaggcucucgcgcugcuuccagcgugcuccgauggugcugcgcaccugggu

SEQ ID NO: 57407 - RNA, 73 nt, Mycobacterium bovis subsp bovis AF2122/97
gccacggugugcuggugugcgcgccgaccggcgcuggcaagacgguggucggcgaguucgccgugcaccuggc

SEQ ID NO: 57408 - RNA, 59 nt, Mycobacterium bovis subsp bovis AF2122/97
gccacucggggccgcugcggccuggaaaaauuggucgggcacgggcggccgcgggucgc

SEQ ID NO: 57409 - RNA, 77 nt, Mycobacterium bovis subsp bovis AF2122/97
gccgcggggagcgcugggcagucucgaggaccugucugucugggucgcgucgugccagcagcgcuguccgccgcggc

SEQ ID NO: 57410 - RNA, 61 nt, Mycobacterium bovis subsp bovis AF2122/97
gccgcgcgccggcugcggcccaagcggaugccgccaagccgcaaggcucggcgccagcggc

SEQ ID NO: 57411 - RNA, 65 nt, Mycobacterium bovis subsp bovis AF2122/97
gccgccugccacuggugucacgucauggcccacgagucauucgacgacgacgagguggccgcggc

SEQ ID NO: 57412 - RNA, 66 nt, Mycobacterium bovis subsp bovis AF2122/97
gccgccagcagugcgggcgaucgugacgagccugaucucggugagcccauaccgcugaauugcggc

SEQ ID NO: 57413 - RNA, 79 nt, Mycobacterium bovis subsp bovis AF2122/97
gccgaugccgcgcugcgcgccuugauccggcugucggagaauccagacaccggaugggacgagcucaacgcggcucugc

SEQ ID NO: 57414 - RNA, 76 nt, Mycobacterium bovis subsp bovis AF2122/97
gcccgcacugccggugucgaguggguucgggggcgggugguagcccauccaggcgaugguggcaaccgaugcgggc

SEQ ID NO: 57415 - RNA, 60 nt, Mycobacterium bovis subsp bovis AF2122/97
gccgagcgugaacucagggcggaaaaaucgccgaauucccgccccagaugcacgcucggc

SEQ ID NO: 57416 - RNA, 77 nt, Mycobacterium bovis subsp bovis AF2122/97
gcccugccgguacuuggucaccuccgagcccacggcggucaccacgccggcgaucucguggccagggaccacagggu

SEQ ID NO: 57417 - RNA, 89 nt, Mycobacterium bovis subsp bovis AF2122/97
gccggaucuggccaaggcuggagcgcacagcgcgggcggcccggagccggccgcgcgguagcggucuagguccaucggccguauuaggc

SEQ ID NO: 57418 - RNA, 60 nt, Mycobacterium bovis subsp bovis AF2122/97
gccggcggcgacgucugccaucuccgguguguuuggcauggucaggcggccgucgucggc

SEQ ID NO: 57419 - RNA, 102 nt, Mycobacterium bovis subsp bovis AF2122/97
gccgggucaccgacgccucgguggucgucggggcggcggccgcgcacuucggcuggggccgcaccgacuaccaccgacuggccggcgccgugguggccgggc

SEQ ID NO: 57420 - RNA, 59 nt, Mycobacterium bovis subsp bovis AF2122/97
gccguggaucgagcgacccuguuucugcaaggcaccguacuacuggucacgaucauggc

SEQ ID NO: 57421 - RNA, 86 nt, Mycobacterium bovis subsp bovis AF2122/97
gcuugacgcccucgaugugccaggugccgucggguuguucgaacgcuuugguucgacccgcgccgacaucggaaccggcgucgggc

SEQ ID NO: 57422 - RNA, 64 nt, Mycobacterium bovis subsp bovis AF2122/97
gcuggugacccaggcgccggucggugugauggugggucaucugcagguuccuggguugaccggc

SEQ ID NO: 57423 - RNA, 69 nt, Mycobacterium bovis subsp bovis AF2122/97
ggaacgucuaggccacuaccgaagacgccggugcccacaccgacuuccuggaguugccggaccaguucc

SEQ ID NO: 57424 - RNA, 61 nt, Mycobacterium bovis subsp bovis AF2122/97
ggaccaugcaucggaagaaccggcaugacaauguucaggccgaguucgucaugcagcuucc

SEQ ID NO: 57425 - RNA, 107 nt, Mycobacterium bovis subsp bovis AF2122/97
ggaccuguaugggcggggagaaccggcugaugcggugacgguggccgccgaacuggaucgccgugggcugcugcgccgcaucggcggugcucccuaccugcacaccc

SEQ ID NO: 57426 - RNA, 61 nt, Mycobacterium bovis subsp bovis AF2122/97
ggacgcggggcguaacuuccuaccggcgcccgggccggugacaaaguuccacccgccgucc

SEQ ID NO: 57427 - RNA, 85 nt, Mycobacterium bovis subsp bovis AF2122/97
ggacgcguuggcgcuggccgaagccgaccggcccagcgaugacaucgacuucaaggacguucggcuuucagcgcgacgaucaucc

SEQ ID NO: 57428 - RNA, 79 nt, Mycobacterium bovis subsp bovis AF2122/97
ggacacaacgacguccugcgcgugguacucgucggcggccagccccaccgcggcggccuuaacgcgcagcggaaugucc

SEQ ID NO: 57429 - RNA, 69 nt, Mycobacterium bovis subsp bovis AF2122/97
ggacuguucaacuccgguaguuucaacaccggcaucgguaauagcggaaccggcaguacugggcucuuc

SEQ ID NO: 57430 - RNA, 94 nt, Mycobacterium bovis subsp bovis AF2122/97
gcguuggucgcgcuggcguguaugguguuggccgggugcacggucagcccgccgccggcaccccagagcacugauacgccgcgcagcacaccgc

SEQ ID NO: 57431 - RNA, 68 nt, Mycobacterium bovis subsp bovis AF2122/97
gcguuggugaagugcaacacgaacguuggaucggcuucgaaccagcgaaugucguugccucggcgagc

SEQ ID NO: 57432 - RNA, 56 nt, Mycobacterium bovis subsp bovis AF2122/97
gcucagccgugugcggauacuugacgcugugacgcagcaccgcaucucgguugagc

SEQ ID NO: 57433 - RNA, 66 nt, Mycobacterium bovis subsp bovis AF2122/97
gcucgucaacgccuuuuucagcucucggugcaacuugauugccugggaucgaggggucuucauggc

SEQ ID NO: 57434 - RNA, 74 nt, Mycobacterium bovis subsp bovis AF2122/97
gcugcgccaaccagcgcuuggccggcagcgagaccugcagcugcagccgccgcugcgccagccgcuugcccagc

SEQ ID NO: 57435 - RNA, 102 nt, Mycobacterium bovis subsp bovis AF2122/97
gcugaucaacggcaguuugguuaaccccagccugcgcaagacggugacggcuguccugccgcacgccaagguuuugcgcgggcucaagaagcuaugauuugc

SEQ ID NO: 57436 - RNA, 85 nt, Mycobacterium bovis subsp bovis AF2122/97
gcuggcggaaggugaucaccgccaccuugucccugcgcugguaggcgucgcgcagcagcgacaggguggcgccacugaccgcagc

SEQ ID NO: 57437 - RNA, 57 nt, Mycobacterium bovis subsp bovis AF2122/97
gcugggccuuacgcaccugccgcucagcgacggccggcaggugcgcuaggucccggu

SEQ ID NO: 57438 - RNA, 84 nt, Mycobacterium bovis subsp bovis AF2122/97
gcgccgcggugcggcaccaugaugacgugcuuuagcuucggccguucgccggaggucgugguggugcucaacucgacgcggcgc

SEQ ID NO: 57439 - RNA, 62 nt, Mycobacterium bovis subsp bovis AF2122/97
gcgcgcggacgucgaugucgagcuguugggccaacgacagcugcugguuugagucugcgugc

SEQ ID NO: 57440 - RNA, 129 nt, Mycobacterium bovis subsp bovis AF2122/97
gcgcgcgguuggucacuuugcaccgaguggccugacuucucgacgaugugaacgccacggaaaugcguugcacgccuguggaguucggcgguguccuggucggugacgaagcccgacgagccgccgcgc

SEQ ID NO: 57441 - RNA, 69 nt, Mycobacterium bovis subsp bovis AF2122/97
gcggcguggaaugcaugaucgucgccaacgacccgacggucaagggcggcaccagcaauccguggacgc

SEQ ID NO: 57442 - RNA, 87 nt, Mycobacterium bovis subsp bovis AF2122/97
gcggcguuucugcgcggugucaacgucggcggcgucaaccucaagauggccgagguggcgacggcguugaccgaugcgggauucugc

SEQ ID NO: 57443 - RNA, 91 nt, Mycobacterium bovis subsp bovis AF2122/97
gcggcgccgauaccgccgagcacgccggcgcgguugcgcugcgaccacaaaucggcgcccagcgccagcgugaucggcaauagcgcgccgc

SEQ ID NO: 57444 - RNA, 79 nt, Mycobacterium bovis subsp bovis AF2122/97
gcggaucagcugguccagccgcagcgugcgcggcaccccgucgacgaucgcuagcauguuggcgccaaagcuggucugc

SEQ ID NO: 57445 - RNA, 85 nt, Mycobacterium bovis subsp bovis AF2122/97
gcggaucuggccuuggcaguccagccgggugccggcauagaucgggucguuggcggcggucggcugggcgaagcccagaucuugc

SEQ ID NO: 57446 - RNA, 104 nt, Mycobacterium bovis subsp bovis AF2122/97
gcggcccgucacuugcgccgaaggugaacucacggcgagguuucgcggcgcucgcgaauucaugcccucaguucacguucgacguucgugaucaacggugccgc

SEQ ID NO: 57447 - RNA, 60 nt, Mycobacterium bovis subsp bovis AF2122/97
gcggcaugcgcgaucugcagagcgcggccggucugcucgagcauguccagugcgugccgc

SEQ ID NO: 57448 - RNA, 68 nt, Mycobacterium bovis subsp bovis AF2122/97
gcguggggcucggccaguugcuccuggcgcuggaugcgaccguggucagccugguggacgccccgcgc

SEQ ID NO: 57449 - RNA, 98 nt, Mycobacterium bovis subsp bovis AF2122/97
gcgugccgggcccccuaccgucgauguggcgggaguaguucucgaugcccgagcagaacccgaccugccgcaucauuucgaugucguaguuggugcgc

SEQ ID NO: 57450 - RNA, 79 nt, Mycobacterium bovis subsp bovis AF2122/97
gcguaguggucggccaccagcuggacgccgucgcgcaucgggacucggacgugaccgacgguguagcgggugguugcgc

SEQ ID NO: 57451 - RNA, 67 nt, Mycobacterium bovis subsp bovis AF2122/97
gcgguugggcagacgcuggucaacgagggauucgagccucuuucgcaacagcagcugauccaacggu

SEQ ID NO: 57452 - RNA, 91 nt, Mycobacterium bovis subsp bovis AF2122/97
gcgguacacgucggcgcuugggaagguuacagcugguuggcguucggaaccaccaaugggauguugccgagcaucaccgacagugcgccgc

SEQ ID NO: 57453 - RNA, 77 nt, Mycobacterium bovis subsp bovis AF2122/97
gcgguccaaggucaacccggcggagucguguucgagcauguucugaagugccuugaauucgccccggccuggaucgc

SEQ ID NO: 57454 - RNA, 75 nt, Mycobacterium bovis subsp bovis AF2122/97
gcggggcccgccaacaaggugccguccggguuuaugacgccgucgccggccuugaccgccuugauggcggccugc

SEQ ID NO: 57455 - RNA, 59 nt, Mycobacterium bovis subsp bovis AF2122/97
gcgggucauccagcaguacgaggacgggccugcgggcccgaagcugcucgagaccgagc

SEQ ID NO: 57456 - RNA, 64 nt, Mycobacterium bovis subsp bovis AF2122/97
gcgggucgccgaggcgcggauuccgacucgucauggggaguuucgcgccaucggcuacaccagc

SEQ ID NO: 57457 - RNA, 60 nt, Mycobacterium bovis subsp bovis AF2122/97
gcgggucggcgucuccaguuucuauuucuugacauggaaaaacggcggccccgacccugc

SEQ ID NO: 57458 - RNA, 59 nt, Mycobacterium bovis subsp bovis AF2122/97
gcgggcugcagcgguaguacuuuggccuguucggcgcaucuccuauggcugcggcccgc

SEQ ID NO: 57459 - RNA, 70 nt, Mycobacterium bovis subsp bovis AF2122/97
gcgggcugcccaaucagcgcugcgaccaggucucggcuggcgugcaguucggugaugugggucagcgugc

SEQ ID NO: 57460 - RNA, 58 nt, Mycobacterium bovis subsp bovis AF2122/97
gcgcgcccgacgggcggugaucggaugccgcauccugaccgccucgauucgggcccgc

SEQ ID NO: 57461 - RNA, 58 nt, Mycobacterium bovis subsp bovis AF2122/97
gcgccgguggcaggcgugacagccgcggucagugcacgccucaaagccgaugaggcgc

SEQ ID NO: 57462 - RNA, 79 nt, Mycobacterium bovis subsp bovis AF2122/97
gcgccggcggucagcacgcaugugcgguggccgacgcccucggcauccgcacggugcugaucccaccaauggccggcgu

SEQ ID NO: 57463 - RNA, 58 nt, Mycobacterium bovis subsp bovis AF2122/97
gcgccagugcugcgcgugcacaauguuguuggcggucaaugcacuccaccgcuggcgc

SEQ ID NO: 57464 - RNA, 55 nt, Mycobacterium bovis subsp bovis AF2122/97
gcgccgccggggaucccgaccugcuggugucgcgggucgcggucugcggcggcgc

SEQ ID NO: 57465 - RNA, 63 nt, Mycobacterium bovis subsp bovis AF2122/97
gcgauuugugcuuucagcuugucucgacgcugggaaugugucacgacccuugacgguacucgc

SEQ ID NO: 57466 - RNA, 65 nt, Mycobacterium bovis subsp bovis AF2122/97
gcgccaccaugcgcgccuacgcgaaacuacuaggcuguucugcgacaugagugcauggcgggcgc

SEQ ID NO: 57467 - RNA, 60 nt, Mycobacterium bovis subsp bovis AF2122/97
gcgagaugucagcagaucggcuauacgagcgguugcugggcuggcuugccgacauucagc

SEQ ID NO: 57468 - RNA, 58 nt, Mycobacterium bovis subsp bovis AF2122/97
gcgagcagacgcaaaaucgcccgaaagccaucgguuucgggcgauuuugcguccucgu

SEQ ID NO: 57469 - RNA, 64 nt, Mycobacterium bovis subsp bovis AF2122/97
gcgauaucgguggccagcgaggcgccggcaaccagcucgcgagucugaccgcugaaccggucgc

SEQ ID NO: 57470 - RNA, 57 nt, Mycobacterium bovis subsp bovis AF2122/97
gcgacagugaugcccagucugcugcugaaccggaggcagagccgaucguccuguugc

SEQ ID NO: 57471 - RNA, 71 nt, Mycobacterium bovis subsp bovis AF2122/97
gcgaccagucagagucucgggcauguacguaauguagacguacuucgucgacgucugaucgguguugaugc

SEQ ID NO: 57472 - RNA, 83 nt, Mycobacterium bovis subsp bovis AF2122/97
gcgaccgauggugguuugguugccuaccgcgugggcgcgcaccaccacgcguccgcgcaccacgaccgaaccggcgugcacgc

SEQ ID NO: 57473 - RNA, 97 nt, Mycobacterium bovis subsp bovis AF2122/97
gcgaacuccgcguuaucggacaggucggcaccaccaucgggcucggucuacuuuucgauacccuggugguccgaucguucaugacgccauccaucgc

SEQ ID NO: 57474 - RNA, 62 nt, Mycobacterium bovis subsp bovis AF2122/97
gccuggaggaccuggacucggcgcugaaggaaaccagccagcugaaccugauccucaagggc

SEQ ID NO: 57475 - RNA, 130 nt, Mycobacterium bovis subsp bovis AF2122/97
gccuggauccugccggucggccuucccggcgaccuggguucgacccaguccaagcaggcguacgcccgcgucgcugacaucgucgaacaccaggucgcaggcucgacacugacggcuaaccugaccgggc

SEQ ID NO: 57476 - RNA, 91 nt, Mycobacterium bovis subsp bovis AF2122/97
gccuguccgaugaucgcgaguuuguccagcgucugcuuggcacggaucuccuggaccaugccgaugacgcuguuggcgaugaugagcaggc

SEQ ID NO: 57477 - RNA, 72 nt, Mycobacterium bovis subsp bovis AF2122/97
gccugggguucgacggggaucucagacuuggggggauugggaggugaugagacccccgucgaagucuagugc

SEQ ID NO: 57478 - RNA, 74 nt, Mycobacterium bovis subsp bovis AF2122/97
gccguuccggugguggucuccagcgcgcucgauuccgccgucggaaucgccgccggccugaccgccgccgcggc

SEQ ID NO: 57479 - RNA, 63 nt, Mycobacterium bovis subsp bovis AF2122/97
gccugguguccgagcggcccuucaccagccaccccugcgguccgcugccaucggcaccagcgc

SEQ ID NO: 57480 - RNA, 62 nt, Mycobacterium bovis subsp bovis AF2122/97
uacccgcaucuguuggcgcucucggccucaucacccuggugggguggcgaagacaccgggua

SEQ ID NO: 57481 - RNA, 56 nt, Mycobacterium bovis subsp bovis AF2122/97
guuuuccucggugcgggcgcgcuggaagccgaguugcgccaccgccagaggauaac

SEQ ID NO: 57482 - RNA, 84 nt, Mycobacterium bovis subsp bovis AF2122/97
guuggcggugguuucguggccggcgagcaugaacgucagagcuucaucgcguacucgcuggcggggccagauuccgccgucggc

SEQ ID NO: 57483 - RNA, 111 nt, Mycobacterium bovis subsp bovis AF2122/97
guuggguugccaagauuuuccguguuggccggguggucgagcccgcggcccccuuaccggcggcgauagccgaaccacccgccgggguacgggguucgcugcagauccgac

SEQ ID NO: 57484 - RNA, 78 nt, Mycobacterium bovis subsp bovis AF2122/97
guuguguugaucaccaccggcacccaaggcgagccgaugucggcguugucgcgaaugucgcguggggagcaucgcagc

SEQ ID NO: 57485 - RNA, 58 nt, Mycobacterium bovis subsp bovis AF2122/97
guugugaagacgccauucgcagaguuagcaagcgugcugcgauugguguuuccgccac

SEQ ID NO: 57486 - RNA, 69 nt, Mycobacterium bovis subsp bovis AF2122/97
ucaccggccgguugugcccggcuccgugcgagccggcgugugugcugggcaucaaccaggauccgguga

SEQ ID NO: 57487 - RNA, 85 nt, Mycobacterium bovis subsp bovis AF2122/97
uagucagauucgcgagccgccaccgcuaccacccgugcugcucgagguguggccggugaucgcggucggcgcgcucgccuggcug

SEQ ID NO: 57488 - RNA, 121 nt, Mycobacterium bovis subsp bovis AF2122/97
uaucggaaggggcaaggcuaguuuugcgagaauuccguugcgccuauuugaaagcccgacaugaaacgaucgcuuuuaagcgcauaugucuguucugcaaaaaugucuaauuuuuccgaua

SEQ ID NO: 57489 - RNA, 70 nt, Mycobacterium bovis subsp bovis AF2122/97
uagcuugucgaccgugcggucgaauuccguuugaugcuugacggugguggccagcacgguguucaaguug

SEQ ID NO: 57490 - RNA, 56 nt, Mycobacterium bovis subsp bovis AF2122/97
uagcgggccauggacuggucgucgaacacguugucaccgcuuccauggcguuguua

SEQ ID NO: 57491 - RNA, 77 nt, Mycobacterium bovis subsp bovis AF2122/97
uccucgaccgcgcagcgugaucaccgaaccuggcugcgugccggguggaauggugaucucgcucaggccguccagga

SEQ ID NO: 57492 - RNA, 57 nt, Mycobacterium bovis subsp bovis AF2122/97
ucgaacgugaacggcuggaguccaagaagaucuccaagacccaggccgucacuucga

SEQ ID NO: 57493 - RNA, 88 nt, Mycobacterium bovis subsp bovis AF2122/97
uccccgacgguguguagcccaccggugcuguaggcgaaggugcaggcaaagaucgccagcaccaccugguugggcacaucgcgcagga

SEQ ID NO: 57494 - RNA, 117 nt, Mycobacterium bovis subsp bovis AF2122/97
uccggcgaguacugcaccaugccgaacggcaccgaggcgccgggaaaguuguugaucucccccacuaucgcggcucccgugccggugccgaugagcguauugacaugcucgaccgga

SEQ ID NO: 57495 - RNA, 68 nt, Mycobacterium bovis subsp bovis AF2122/97
uccagcuaaacccaaagccuugcaugaggcaaaggcggccguucaugaccuggcgggucgugguugga

SEQ ID NO: 57496 - RNA, 58 nt, Mycobacterium bovis subsp bovis AF2122/97
uccagcacugucuuggcuucggcgccaaauuccguugcgccggagcugacguacugga

SEQ ID NO: 57497 - RNA, 57 nt, Mycobacterium bovis subsp bovis AF2122/97
ucaccugcccggcaccuggagcgcgcugcgaucagccggugaagccggguuugguga

SEQ ID NO: 57498 - RNA, 99 nt, Mycobacterium bovis subsp bovis AF2122/97
ucagccacuugcgauacaacguguuccaggugccgucauugcggaugcguucgagcgugccguugacgaaccggaccaauccgguguuguccagguuga

SEQ ID NO: 57499 - RNA, 69 nt, Mycobacterium bovis subsp bovis AF2122/97
ucagcgagaagccuuguggugcgcccauuuccaucggugaacggauggauucgcacaaggucugcauga

SEQ ID NO: 57500 - RNA, 72 nt, Mycobacterium bovis subsp bovis AF2122/97
ucgacccaccgugguguccggcggccgcuugcucgucgguggcccacugcaaccggaccucgcgggagucga

SEQ ID NO: 57501 - RNA, 60 nt, Mycobacterium bovis subsp bovis AF2122/97
ucgagcucacccaggguggccgcacagcggugcacgccguggucacccugggugagccgg

SEQ ID NO: 57502 - RNA, 55 nt, Mycobacterium bovis subsp bovis AF2122/97
ucgaggacggugucgagccccgcgacgucuggcgggcauugugcgccgacuucga

SEQ ID NO: 57503 - RNA, 89 nt, Mycobacterium bovis subsp bovis AF2122/97
ucgcgacccaggccaccgcgcggccaccgacguucguguuguucaccacggguuuuuuggaggccggcuaucggcgguucuuggagcgg

SEQ ID NO: 57504 - RNA, 64 nt, Mycobacterium bovis subsp bovis AF2122/97
ucgcgcgucugcguugagaccagcaucccacgaucguggggguuggugauguagccgauaucga

SEQ ID NO: 57505 - RNA, 86 nt, Mycobacterium bovis subsp bovis AF2122/97
ucgcgguugcugaaaccauuagccuuaugccugucacaccaccgcgguuggcggggugaggagucgggcgauggauggcaccgcgg

SEQ ID NO: 57506 - RNA, 57 nt, Mycobacterium bovis subsp bovis AF2122/97
ucgcguuguuggccaacuugggcccguugaccuggccugggauggucaacaccguga

SEQ ID NO: 57507 - RNA, 70 nt, Mycobacterium bovis subsp bovis AF2122/97
ucgcuacgacagcgacuugggcgcgcggcuggcggucgcgcacgcccuugcgcugcaauucgguuggcgg

SEQ ID NO: 57508 - RNA, 89 nt, Mycobacterium bovis subsp bovis AF2122/97
ucgcucucggcgcugucguuggccaaccugcugcacgagaucuucggcgucgacgugccggugggugucauugucagcccggcaagcga

SEQ ID NO: 57509 - RNA, 70 nt, Mycobacterium bovis subsp bovis AF2122/97
ucggacggcaccaagucaccggcauccaaguagcguuuggcuuccacgccgagcuuggugcccucuucga

SEQ ID NO: 57510 - RNA, 85 nt, Mycobacterium bovis subsp bovis AF2122/97
ucggaaguccaccgcucugccgagucccguuguaccgccccaggcaaaugccucagcguugcggcggguacugcgacgggcccga

SEQ ID NO: 57511 - RNA, 71 nt, Mycobacterium bovis subsp bovis AF2122/97
ucgcugcggggugggcuggugcuagggcuggaggauuccagcucccggaugagccggcucggccgcagcga

SEQ ID NO: 57512 - RNA, 113 nt, Mycobacterium bovis subsp bovis AF2122/97
ucggugcuggugucgugggugcuguucaccuggaugauuggccggcugccgcgggagccggucgguuuggucaccgcggcgcgggccggguugauggcggcggucggcuucga

SEQ ID NO: 57513 - RNA, 55 nt, Mycobacterium bovis subsp bovis AF2122/97
ucgggguggugcaggauggcgucgacggccuccuugucgccgugcaccaccugga

SEQ ID NO: 57514 - RNA, 86 nt, Mycobacterium bovis subsp bovis AF2122/97
ucggucgccgccgcgucgccggucucccagucgaagaugugauugucgcucuuucccuccagaucggugcggaugaccggcgccga

SEQ ID NO: 57515 - RNA, 72 nt, Mycobacterium bovis subsp bovis AF2122/97
ucggcgaagggcuggaccgcgaggagcugcaaccacgguugccggcggucauggaccggcuugaucgcgcga

SEQ ID NO: 57516 - RNA, 70 nt, Mycobacterium bovis subsp bovis AF2122/97
ucggccagcugcgcggcuauccggcccaucggggcccgcuugcccgggucacgaucgccgccggcgccga

SEQ ID NO: 57517 - RNA, 119 nt, Mycobacterium bovis subsp bovis AF2122/97
ucgucaucuccgcacgcgcggaacccauccgccgccugcucggcggccugaaugaaacgguguucaggcuacgguagcggugcgcacggggacaaacgcgacgugggcggaggucacgg

SEQ ID NO: 57518 - RNA, 79 nt, Mycobacterium bovis subsp bovis AF2122/97
ucggcgcgcacauugaaaccgaugaucaccgcaucggaagccgacgccagguugacguugguuucgguaaugccgccga

SEQ ID NO: 57519 - RNA, 75 nt, Mycobacterium bovis subsp bovis AF2122/97
ucuaccggcaaggcagggaggaauucgacaccgaacucggaccggugguggccaacuuccugcucgccgacgaga

SEQ ID NO: 57520 - RNA, 57 nt, Mycobacterium bovis subsp bovis AF2122/97
ucgucgggagcuaugcguccgaaguccuugugcucgggcagcaggaugcgccugcga

SEQ ID NO: 57521 - RNA, 94 nt, Mycobacterium bovis subsp bovis AF2122/97
ucuagcaccgccacccggucgcugagcacccuggccagcaccuugcgugccaccgccagcagcucggcgauaucgggugcggcaaucgaauaga

SEQ ID NO: 57522 - RNA, 69 nt, Mycobacterium bovis subsp bovis AF2122/97
ugaucugcacggccaaaggcaucgccgauggauugccgcugucggcggucaccggccgcgccgagauca

SEQ ID NO: 57523 - RNA, 72 nt, Mycobacterium bovis subsp bovis AF2122/97
ugaugaagccgccuuggacgacgguuccgaugcuggagaacagcaggccggacaucgaagcggcaaauauca

SEQ ID NO: 57524 - RNA, 60 nt, Mycobacterium bovis subsp bovis AF2122/97
ugaaggucuugugcccguugaggauguagucuucaccgucgcgggucacgugagucuuca

SEQ ID NO: 57525 - RNA, 78 nt, Mycobacterium bovis subsp bovis AF2122/97
ugcacgccagcgucccggguugcuggccgcuuggcuggacggcgaccucggcgagcugcccggcgacuuggccuggca

SEQ ID NO: 57526 - RNA, 60 nt, Mycobacterium bovis subsp bovis AF2122/97
ugcaauguuucgacgggcaccaaauccggauuuccguuugacuccacgcgaaacacagua

SEQ ID NO: 57527 - RNA, 84 nt, Mycobacterium bovis subsp bovis AF2122/97
ugcaggugcacuacgucggugauuugguugcggcgcaccaacguucgaagcaucgacauuaccggcguaauccccgacccggca

SEQ ID NO: 57528 - RNA, 80 nt, Mycobacterium bovis subsp bovis AF2122/97
ugccgacaucggccgccagcucucggcgcuggccgacgccuacgacgucaagcugccccgcgagcuggugcugaucggca

SEQ ID NO: 57529 - RNA, 68 nt, Mycobacterium bovis subsp bovis AF2122/97
ugccgcccggugaggaccuggccgcgcucgcccgaucccgcgccacucuggucuugcaccuggccgca

SEQ ID NO: 57530 - RNA, 63 nt, Mycobacterium bovis subsp bovis AF2122/97
ugcgaccucaccagcggcuuucgagcuuuguucgaucaaccggccagcauggucgaggaugca

SEQ ID NO: 57531 - RNA, 64 nt, Mycobacterium bovis subsp bovis AF2122/97
ugcgccacuggggucaccgacggcgaccugcucaagggagugcguuacuaccccggcggcugca

SEQ ID NO: 57532 - RNA, 130 nt, Mycobacterium bovis subsp bovis AF2122/97
ugcgccagcgcggcgagaucacccgcgcgggggucaccggccuggugcucaauagcccguuccuggaucugcaaggcccggcaauccugcgccugccgcugaccucggcguucuucgccgcgauggcgcg

SEQ ID NO: 57533 - RNA, 69 nt, Mycobacterium bovis subsp bovis AF2122/97
ugcgcccggguuugaccacgaugcugaacgucacguccagcguugucucggcgaacaccugcaggcgca

SEQ ID NO: 57534 - RNA, 57 nt, Mycobacterium bovis subsp bovis AF2122/97
ugcuggccgcgcuggcgugggugugcgccgaugccauccugcuggugcggaccggca

SEQ ID NO: 57535 - RNA, 64 nt, Mycobacterium bovis subsp bovis AF2122/97
ugcugucggugcccgucuucagccgggacacuuacucguaucuggcccaaggggcgcuucugcg

SEQ ID NO: 57536 - RNA, 55 nt, Mycobacterium bovis subsp bovis AF2122/97
ugcuccggcacguuggucgagauugacgcauaggcucuggccaaggugucgagca

SEQ ID NO: 57537 - RNA, 93 nt, Mycobacterium bovis subsp bovis AF2122/97
ugcggcucaggcccgcgaacggcucggcuuugugaugccuggagacaucccguuucagguccagcuuccgucgacgccguuggcgccgccgca

SEQ ID NO: 57538 - RNA, 130 nt, Mycobacterium bovis subsp bovis AF2122/97
ugcgcuaccaccgcaccggggucgggaugucgaggacugggcauggcagcaggcccgucccgccggccacgacgguggggcuggcucugcuugccgcggcgauuacucucuggcuugguuugguggcgca

SEQ ID NO: 57539 - RNA, 57 nt, Mycobacterium bovis subsp bovis AF2122/97
ugggcaugaucuguggaucaggaacccgauacgggauuccacgguuuaucgugccca

SEQ ID NO: 57540 - RNA, 61 nt, Mycobacterium bovis subsp bovis AF2122/97
uggccggacugggugcggcgguggcccacgccgucggccaccgccacggccagcaccgccg

SEQ ID NO: 57541 - RNA, 55 nt, Mycobacterium bovis subsp bovis AF2122/97
ugggcugaacaggacggccgccaguggaggauaggugaacgggagguucagcccg

SEQ ID NO: 57542 - RNA, 68 nt, Mycobacterium bovis subsp bovis AF2122/97
uggcuguugucuugcucgcuuuggcuggcgcuuccuuugcggcagccggcuugucgggcaccggcgca

SEQ ID NO: 57543 - RNA, 57 nt, Mycobacterium bovis subsp bovis AF2122/97
uggcugggcgaccgcggugucggugaucuccucggucgaggcgguggugcccagccg

SEQ ID NO: 57544 - RNA, 57 nt, Mycobacterium bovis subsp bovis AF2122/97
uggcgccgcuacggggcggguauaucgcagauaucacgccucucggugguggggcca

SEQ ID NO: 57545 - RNA, 104 nt, Mycobacterium bovis subsp bovis AF2122/97
ugguuugagcagcgcgauagggaauucggguuuccagaaccucggcucgcugcagucaggcugggcgaaccugggcaacuccguaucgggcuuuuucaacacca

SEQ ID NO: 57546 - RNA, 107 nt, Mycobacterium bovis subsp bovis AF2122/97
uggucaggccggcgccgcuggcggcgccggguugggcuucggagcggucgggcacccgacuccucagccggcggcccugggcgcggcuggcgugguggccaagaccg

SEQ ID NO: 57547 - RNA, 61 nt, Mycobacterium bovis subsp bovis AF2122/97
ugguaggcgccaccggcguguuccucgcuugucgcugggcacaggccgauggcgcugacca

SEQ ID NO: 57548 - RNA, 103 nt, Mycobacterium bovis subsp bovis AF2122/97
uggugaaacagcccaagaagaagaacacggccgccgcugccacggcggcuauugucacuguuuuggcccggcugcgcgucgugucaucggaggggagucgcca

SEQ ID NO: 57549 - RNA, 62 nt, Mycobacterium bovis subsp bovis AF2122/97
uguugaucucacccgaaguuguguccgccgccgccggggaucuagcgaacgugggaucgaca

SEQ ID NO: 57550 - RNA, 71 nt, Mycobacterium bovis subsp bovis AF2122/97
uguccggugggcacaguuuugccgccagccaucugcgcgauggcgcugugcugcucgacgugagccggaua

SEQ ID NO: 57551 - RNA, 56 nt, Mycobacterium bovis subsp bovis AF2122/97
ugucugagagccccggaaagcgcucgccuaggccgcaggagcgcggcucauaggca

SEQ ID NO: 57552 - RNA, 57 nt, Mycobacterium bovis subsp bovis AF2122/97
ugguggcugugucgaccgggaacggcaacuacgccgugaucguugauacagcgacca

SEQ ID NO: 57553 - RNA, 59 nt, Mycobacterium bovis subsp bovis AF2122/97
uucaugcugugugaaccgggauagaccgcguagccgucccaggugccauacgagcugaa

SEQ ID NO: 57554 - RNA, 102 nt, Mycobacterium bovis subsp bovis AF2122/97
uuccgagcuucaucccugaggacuucaccuuccuugacgccauauucgcuggauaugccacgguaggugugacgcaggaugucgaguccuuuguugccggga

SEQ ID NO: 57555 - RNA, 58 nt, Mycobacterium bovis subsp bovis AF2122/97
guaccgcggaaagucggcgacgccgucguauucgaugguguagaucuuggucggguac

SEQ ID NO: 57556 - RNA, 100 nt, Mycobacterium bovis subsp bovis AF2122/97
guagcgugcccaguagaccucacgccggcgugcaucggugaccaccagcgugucaccgaugguuugcccgccgauggcguccaggcugcacacgccauac

SEQ ID NO: 57557 - RNA, 76 nt, Mycobacterium bovis subsp bovis AF2122/97
guagcccgccgagcagacgcaaaaucgcccauuucgugccgaaaugaggcgauuuugcgucugcucgccgggcuac

SEQ ID NO: 57558 - RNA, 58 nt, Mycobacterium bovis subsp bovis AF2122/97
guaugggucgauucggcggugcccaucggugaugugguggcgcaauucgaccaggugc

SEQ ID NO: 57559 - RNA, 70 nt, Mycobacterium bovis subsp bovis AF2122/97
guccaagcaggcgaucggccgggcgacgaacaacgucgccgaauaccgcggccugauagccgguuuggac

SEQ ID NO: 57560 - RNA, 56 nt, Mycobacterium bovis subsp bovis AF2122/97
gucacccgccugugcggguggacguaugcccuuuccgucguccugcugugggugac

SEQ ID NO: 57561 - RNA, 65 nt, Mycobacterium bovis subsp bovis AF2122/97
gucacgagcguaaccccagugcgaaaguucccgccggaaaucgcagccacguuacgcucguggac

SEQ ID NO: 57562 - RNA, 70 nt, Mycobacterium bovis subsp bovis AF2122/97
gucacguucccuguacgcgugccgcccgacuugguuugccaggucaccgagaugacgucaccgggaugau

SEQ ID NO: 57563 - RNA, 89 nt, Mycobacterium bovis subsp bovis AF2122/97
guauuuggagccggcgaccaucgagccgagaucgagcgcgacgauggucuugucgcgcaagcucuccggcacgucgccggccacgaugc

SEQ ID NO: 57564 - RNA, 69 nt, Mycobacterium bovis subsp bovis AF2122/97
gucgacgucgaagacgaucaggcguuuggugcgccaagccaagccguaguccucgacggccacaucgac

SEQ ID NO: 57565 - RNA, 92 nt, Mycobacterium bovis subsp bovis AF2122/97
gucccggugcgggguucggccaguucguggcgaccaugcgccgguugcaggaccuggcggucgcggcggaccccggcgacgccgugugggac

SEQ ID NO: 57566 - RNA, 67 nt, Mycobacterium bovis subsp bovis AF2122/97
guccguaccggcugggcagcgcaucguugacgauuugauccagcauggccucccggccgaugcgggc

SEQ ID NO: 57567 - RNA, 122 nt, Mycobacterium bovis subsp bovis AF2122/97
guccgaggacggcaggagcggccgggcucgcuggguggugggaaccgcuccagggcgggccaucccguucggcgcuuuccgccauuugaucagccugcccgccuccggagccgacauugggc

SEQ ID NO: 57568 - RNA, 93 nt, Mycobacterium bovis subsp bovis AF2122/97
guccgcggagaacguugucaugugcauggugaccgggugccgcucgaugagcgcacgugcggucaccaucucgcagacauacaguccgcugac

SEQ ID NO: 57569 - RNA, 102 nt, Mycobacterium bovis subsp bovis AF2122/97
ggucgguggggaugaggcguggguugugaacggaaccgccgggacuguaugagucugugcgcgguuugugcacagcgacacucacagccaaucucugugacu

SEQ ID NO: 57570 - RNA, 67 nt, Mycobacterium bovis subsp bovis AF2122/97
ggucgccucccgggcugggcugguuauggaagcuggauccaaagucaccuacaacgggguggagauc

SEQ ID NO: 57571 - RNA, 87 nt, Mycobacterium bovis subsp bovis AF2122/97
ggugaucggaugcguuggcagcgugaaguguucgggcggcaccgucgggccgcucgggggccgcgucgccaguggcgucgugauccc

SEQ ID NO: 57572 - RNA, 57 nt, Mycobacterium bovis subsp bovis AF2122/97
ggugauccggggcacgucgaggcuguagaacaggcugaacaggcccucgugaucacc

SEQ ID NO: 57573 - RNA, 68 nt, Mycobacterium bovis subsp bovis AF2122/97
ggugcgcggcagcgcccgggucaccagccccgaaccggaggcgaccuaucaggcgcugcagaaguacu

SEQ ID NO: 57574 - RNA, 63 nt, Mycobacterium bovis subsp bovis AF2122/97
gguugcgcugcgagcggcuuaaccgaacucggugcacacagccuccagcucgcgaagccaacc

SEQ ID NO: 57575 - RNA, 80 nt, Mycobacterium bovis subsp bovis AF2122/97
gguugacguaccgcggccggucggccaucaccuuacgcagcgaccccgcgcccggccgcuggucgcguacuagcucaucc

SEQ ID NO: 57576 - RNA, 60 nt, Mycobacterium bovis subsp bovis AF2122/97
gguuuggcgcgcccacagcccgggcggaaagcccgucgggccgucgggugugcgcagauu

SEQ ID NO: 57577 - RNA, 78 nt, Mycobacterium bovis subsp bovis AF2122/97
gguugugcuguuuugggccucggcgagccgacacgccucggcguucucagcuaagcgcugccuaaaccaugccuaacc

SEQ ID NO: 57578 - RNA, 70 nt, Mycobacterium bovis subsp bovis AF2122/97
gguguugggucagggcuucgaccgagaugugcugcugcgugcgggcauccagggggccgacgcauucgcc

SEQ ID NO: 57579 - RNA, 56 nt, Mycobacterium bovis subsp bovis AF2122/97
gguguaggucguugccgaccucgauccgcccgcugaacucggucgcggccagcgcc

SEQ ID NO: 57580 - RNA, 79 nt, Mycobacterium bovis subsp bovis AF2122/97
gguguauguggcgcugacacuccccucgggaucggggcccaccgcgauccaggaauugucagacguuaucgaccacacc

SEQ ID NO: 57581 - RNA, 82 nt, Mycobacterium bovis subsp bovis AF2122/97
ggugucggggugguagcggcgcuuggcggugucgggcagauugucaucgaucaccaccgagaugccgaaccggucccgcauc

SEQ ID NO: 57582 - RNA, 59 nt, Mycobacterium bovis subsp bovis AF2122/97
ggugguggcccgugaccguacccaggcgauagccggauugcgugcgcuggccgccggcc

SEQ ID NO: 57583 - RNA, 64 nt, Mycobacterium bovis subsp bovis AF2122/97
ggugggcaggugauccucgccggcgucgagcagacccaggcuggccaguucgcccugaccuacc

SEQ ID NO: 57584 - RNA, 76 nt, Mycobacterium bovis subsp bovis AF2122/97
guugaucgcacccgcucguaggaaggcgccggcgagggugggaccuccuuccagcagcacgucggugcgauccgac

SEQ ID NO: 57585 - RNA, 100 nt, Mycobacterium bovis subsp bovis AF2122/97
guucgucgucgucgcgaucaccaucgcuggcgcuucgcugucgaugcgcauuccgcgcugggucgaggugaccagcggugaggucccggccacauugagc

SEQ ID NO: 57586 - RNA, 63 nt, Mycobacterium bovis subsp bovis AF2122/97
guucgcgccaguguccgccgccgagccagguaagcagccccucgauuccggacacggccgagc

SEQ ID NO: 57587 - RNA, 87 nt, Mycobacterium bovis subsp bovis AF2122/97
guggccgcaccgaaguccgggcuguaguacugauccucauacgacgggaugguguacgccgcagcgcgggccuccucggugggcugc

SEQ ID NO: 57588 - RNA, 95 nt, Mycobacterium bovis subsp bovis AF2122/97
gugucucccgcggcgauggcggccugcaccggcgccgcgccacgccaggccggcagcagcgagaagugcagguugacccagccaugcggcggcac

SEQ ID NO: 57589 - RNA, 68 nt, Mycobacterium bovis subsp bovis AF2122/97
guguccagcagcccggucugguguccaacgcucaccaggaucgccaaaccggcgcugucgauggccgc

SEQ ID NO: 57590 - RNA, 56 nt, Mycobacterium bovis subsp bovis AF2122/97
gugguggccguggccgcgucguugaucugguggaccagcgacgcccgcgccaccau

SEQ ID NO: 57591 - RNA, 65 nt, Mycobacterium bovis subsp bovis AF2122/97
guggucaccgucgccgcaaucgagagccgguccgcgcccugcggcucgagcgugacggugaccgc

SEQ ID NO: 57592 - RNA, 78 nt, Mycobacterium bovis subsp bovis AF2122/97
gugguguccaugcccaacucggccagaauguuggcaacggccaacgggugggugauguagggaucaccggacugccgc

SEQ ID NO: 57593 - RNA, 63 nt, Mycobacterium bovis subsp bovis AF2122/97
guguauggcguguucacccccggcuacgucgacgccggcaagguggcgcacaucgccgugcac

SEQ ID NO: 57594 - RNA, 126 nt, Mycobacterium bovis subsp bovis AF2122/97
gucgguccgugccaaccugcacuucuuguggcugcggcuggccaggguguggccgguguaccuggucaccuugcaccuggccgccgugugggucaucuuuacgcugcacgucggucacgugccguc

SEQ ID NO: 57595 - RNA, 63 nt, Mycobacterium bovis subsp bovis AF2122/97
gucgccggggcgggucagggccugcacgacgaucuuguuggcggucgauguuccguuggugac

SEQ ID NO: 57596 - RNA, 60 nt, Mycobacterium bovis subsp bovis AF2122/97
gucgcggacagucccauguuagcugcauguuuagcagacuggcuugccuccugccgcgac

SEQ ID NO: 57597 - RNA, 63 nt, Mycobacterium bovis subsp bovis AF2122/97
gucgcccgcggucugcaugacgaugggcggcaggccgcucaugucgccguagaccggggagau

SEQ ID NO: 57598 - RNA, 69 nt, Mycobacterium bovis subsp bovis AF2122/97
gucgcccuugaggaucagguucagcuggcugguuuccuucagcgccgaguccagguccuccaggcugau

SEQ ID NO: 57599 - RNA, 63 nt, Mycobacterium bovis subsp bovis AF2122/97
gucgagcucccggugagacgagagucgggccaaagcuccaucgcgggucaacgggucgcucgc

SEQ ID NO: 57600 - RNA, 72 nt, Mycobacterium bovis subsp bovis AF2122/97
gucguggugcaccugccgaucgcacagguuggcccacaaccggccgcuugaugcccggucggcaagcccggc

SEQ ID NO: 57601 - RNA, 63 nt, Mycobacterium bovis subsp bovis AF2122/97
gugaucgauguugaccgagaugccgccgaggucgaucuugucgccgucucgguccagcuccac

SEQ ID NO: 57602 - RNA, 77 nt, Mycobacterium bovis subsp bovis AF2122/97
gugaugcguucggccgggccguguccgccggauagcaccggcacccgcacggccuccggaccgagcaagcccugcac

SEQ ID NO: 57603 - RNA, 88 nt, Mycobacterium bovis subsp bovis AF2122/97
gugcuggcuugccuggcgagcagacgcaaaagccccuaauaccugccgguuuagggggcuuuugcgucugcucgccggccuaccgcgc

SEQ ID NO: 57604 - RNA, 78 nt, Mycobacterium bovis subsp bovis AF2122/97
gugcggcgucugcugcgugcacaauucccacagugggcggaucuacccauugcaccggugcgcucggcgggcacggac

SEQ ID NO: 57605 - RNA, 99 nt, Mycobacterium bovis subsp bovis AF2122/97
gugccgcacgccgagcguuguccgcauucgcagcgacgguaaaggacuugcgggccaauccuuuccgucgaugcggaagcgaacgaacgcuagcggcgc

SEQ ID NO: 57606 - RNA, 55 nt, Mycobacterium bovis subsp bovis AF2122/97
ggggucagcggucaccggcgauggcgaauggccaccaccgccuggcgcugacccc

SEQ ID NO: 57607 - RNA, 89 nt, Mycobacterium bovis subsp bovis AF2122/97
ggggugaccgccugguuggccgcggcccaugcuggcggcaccgacaacgaaccgaccgaggccgcccgacccaaguuggcggccacccc

SEQ ID NO: 57608 - RNA, 55 nt, Mycobacterium bovis subsp bovis AF2122/97
gggguggugaaguacacgcccggcucgucggcaaucaaggcgaacuucacccccu

SEQ ID NO: 57609 - RNA, 61 nt, Mycobacterium bovis subsp bovis AF2122/97
gggcgucgcuggugggaucgcagcgccauuccaagacguugcgcucgaucacuagcgcccc

SEQ ID NO: 57610 - RNA, 74 nt, Mycobacterium bovis subsp bovis AF2122/97
gggcgucguagguguggcccuccgacagcgccuucugaaagaucgacggguugguggucaccccgacgacgcuc

SEQ ID NO: 57611 - RNA, 87 nt, Mycobacterium bovis subsp bovis AF2122/97
gggcgcuggacuuaugcaagaccaggacggcgccgucgcggauaccgcauugcgccaaugucguugcguuuggcagagcuggcgccc

SEQ ID NO: 57612 - RNA, 89 nt, Mycobacterium bovis subsp bovis AF2122/97
gggcgaaccgccauggcagcucagccgcaagcaccgucagcgggcggccgcccgcgcgcggggaaagcggugaaguccguggcucgccc

SEQ ID NO: 57613 - RNA, 58 nt, Mycobacterium bovis subsp bovis AF2122/97
ggggauagccgcaggauggucuucaaguucaucucuucggggaucuuggggcugcccc

SEQ ID NO: 57614 - RNA, 80 nt, Mycobacterium bovis subsp bovis AF2122/97
ggggcaacaacaggguggugaaguuggcggccggauccaagacccagaccgugcugccguucaccggccucaacgacccc

SEQ ID NO: 57615 - RNA, 130 nt, Mycobacterium bovis subsp bovis AF2122/97
ggggccggaccggccggucaggcgcgcguacucgguauccagcaggccuucggcagugagccgguccaaauggaauuucgccugguggcgcgggaugccgacggcgucggccgccuggucucggcucacc

SEQ ID NO: 57616 - RNA, 129 nt, Mycobacterium bovis subsp bovis AF2122/97
gggcuggcggucgucauacuuuccggggucgcggcggcggccaacgaggcagcggcggcccuccucggcuucccgcugcugcucgugguuggggugucgcuggccuauuuguaugucguccugcuguuc

SEQ ID NO: 57617 - RNA, 85 nt, Mycobacterium bovis subsp bovis AF2122/97
gguaccgggcuccggugguuguggugguguaggucucgaugcgguaguagccgcgcucgcgagccgccgcacuggggccggugcc

SEQ ID NO: 57618 - RNA, 68 nt, Mycobacterium bovis subsp bovis AF2122/97
gguccgaaucgcgauguugucgaucauccaccgacccccgguggcguggucgccgauguccucaagcc

SEQ ID NO: 57619 - RNA, 65 nt, Mycobacterium bovis subsp bovis AF2122/97
gguccgacuagggcaaugccuguugcaauguuuguugagaugagccgaaauuacccugcgugacc

SEQ ID NO: 57620 - RNA, 63 nt, Mycobacterium bovis subsp bovis AF2122/97
ggucauugcgucauuuccuucgauugacuuuugcuggucguuucgaaggaucacgcgaugacc

SEQ ID NO: 57621 - RNA, 88 nt, Mycobacterium bovis subsp bovis AF2122/97
ggucauuggcgaucaaugcgaugcggucgucacggaccgccaccuuggcguugaccagcacgacugcaucgucgacgaugucggcacc

SEQ ID NO: 57622 - RNA, 114 nt, Mycobacterium bovis subsp bovis AF2122/97
ggcgucgccgggcauggcccgggccaaagacguccuggcgcaguacgcggcucaggcacgucacgagcuggccuuacugcccgacgucccgggacggcgugcccuggcggcgcu

SEQ ID NO: 57623 - RNA, 58 nt, Mycobacterium bovis subsp bovis AF2122/97
ggcggugaucgcagacgcguucgguaugcaucuggacagcuuucagcgaaucaccgcc

SEQ ID NO: 57624 - RNA, 73 nt, Mycobacterium bovis subsp bovis AF2122/97
ggcgggcaauccggccugugucgggucgucccagcacguaacggacggcccgacacgggcucggccgcuagcu

SEQ ID NO: 57625 - RNA, 73 nt, Mycobacterium bovis subsp bovis AF2122/97
ggcggcucagcaaauacuggagauagcuaaccuaacggauagguaaauaaauccguguuugccgauggucgcu

SEQ ID NO: 57626 - RNA, 79 nt, Mycobacterium bovis subsp bovis AF2122/97
ggcggccugcgcccuuaauggggugucaccuaccugcagguuuaucugcaccagcgucggcccaucggcgcaguucgcc

SEQ ID NO: 57627 - RNA, 74 nt, Mycobacterium bovis subsp bovis AF2122/97
ggcgcgggaaucauugcccggcuccuggcggccgcugucgccgggcgcggcgggcagaucugaggaggagcgcc

SEQ ID NO: 57628 - RNA, 66 nt, Mycobacterium bovis subsp bovis AF2122/97
ggcggcuuucaucaguuggucgagguugaccccggcgucgaugucgaccagcuuggugucggcguc

SEQ ID NO: 57629 - RNA, 69 nt, Mycobacterium bovis subsp bovis AF2122/97
ggcugcgcuggcccgccgguuucccgccgugauugcagcaccgcgucguaaagcuggcgggugcgcacc

SEQ ID NO: 57630 - RNA, 57 nt, Mycobacterium bovis subsp bovis AF2122/97
gggauccggaagcccuuguagcacaccgacauugguguggaauacgcugcuggucuu

SEQ ID NO: 57631 - RNA, 86 nt, Mycobacterium bovis subsp bovis AF2122/97
gggaguggccacccugggcuuaugugacgacccccagcgcccggcuucgccgcgcucgcaaucgucacggggccugccguccuccc

SEQ ID NO: 57632 - RNA, 71 nt, Mycobacterium bovis subsp bovis AF2122/97
gggcaucgugggccugagcagcgacgacacccgacgacgcgaggucguccgcgacuuggccgcuggugccc

SEQ ID NO: 57633 - RNA, 75 nt, Mycobacterium bovis subsp bovis AF2122/97
gggccauggaaacgcagguggugucaacgugggcuccggaaacgcgggcuuggccaacaccggcgauuucaacuc

SEQ ID NO: 57634 - RNA, 71 nt, Mycobacterium bovis subsp bovis AF2122/97
gggcaugucgguggccgcugccaugucgccgagcaaccgguggccggccucgguccaccccgacagauccc

SEQ ID NO: 57635 - RNA, 80 nt, Mycobacterium bovis subsp bovis AF2122/97
gggagcucgcgcggccgagccugcggauuaucaacgagggcacugauggaugaccugacgcggcuccggcgcgagcuucu

SEQ ID NO: 57636 - RNA, 67 nt, Mycobacterium bovis subsp bovis AF2122/97
gggccgcggcggcgacggcggcaacgccggccacggcggcgccgcccaauucuccggucgcggcgcc

SEQ ID NO: 57637 - RNA, 67 nt, Mycobacterium bovis subsp bovis AF2122/97
ggcuugggccaacacgugcgcggucgaauggcggaucacgcugcgaccgucgucgguguuggcggcc

SEQ ID NO: 57638 - RNA, 58 nt, Mycobacterium bovis subsp bovis AF2122/97
ggcgagcgaggcagccccgaugggggacgagaucggccccugggccgccucgcucacc

SEQ ID NO: 57639 - RNA, 68 nt, Mycobacterium bovis subsp bovis AF2122/97
ggcgagcggcagcgucgggcgguucaacgaacaccagccguucuagccgccccgggcgcagcagcgcc

SEQ ID NO: 57640 - RNA, 82 nt, Mycobacterium bovis subsp bovis AF2122/97
ggccugacaguccagcagcaacgccaagucgcccaggcgaucaagaacgcccgcgagauggcgcugcugcccuacccgggcc

SEQ ID NO: 57641 - RNA, 64 nt, Mycobacterium bovis subsp bovis AF2122/97
ggccugcgccugaucgcguugcugcgcgccgcguaaccgcagcuuggaggcgaucgcgcgggcc

SEQ ID NO: 57642 - RNA, 85 nt, Mycobacterium bovis subsp bovis AF2122/97
ggccgcacggcaugucgucgauguuccgcagcuucgucgccggccaguuggccacguugcgcgaauucacgcugugcuaugcgcc

SEQ ID NO: 57643 - RNA, 61 nt, Mycobacterium bovis subsp bovis AF2122/97
ggccgcauccccgucguagcgguccacgaugaucugcgcgagcgccuggaugcguuuggcc

SEQ ID NO: 57644 - RNA, 66 nt, Mycobacterium bovis subsp bovis AF2122/97
ggccgggaugacagcgaggugcacucggcgauucgguuugcuguuguggccgcugucgucgggguc

SEQ ID NO: 57645 - RNA, 55 nt, Mycobacterium bovis subsp bovis AF2122/97
ggccggcggacacgcuggcgaugaaggccuucagcagggugauguccagcccgcc

SEQ ID NO: 57646 - RNA, 108 nt, Mycobacterium bovis subsp bovis AF2122/97
ggccggcaauauaugucauggaucagccuggaggacgaggugcgggcgcugcaguucgcuaucgcgcagcccaaccuguccggcccggugaacuugaccgggccggcc

SEQ ID NO: 57647 - RNA, 79 nt, Mycobacterium bovis subsp bovis AF2122/97
ggcgaugauguccgucgggaaggugaucgccgcguccgcggcaacggucggaaucaccuuccucggcaugagauucgcc

SEQ ID NO: 57648 - RNA, 76 nt, Mycobacterium bovis subsp bovis AF2122/97
ggcgccccagggggcgugccgccgcagaugggccuccaccgcguccaggugcgccguggcaucgccuccaggcgcc

SEQ ID NO: 57649 - RNA, 78 nt, Mycobacterium bovis subsp bovis AF2122/97
ggcgccggaagccaagagcggauauccggccacuccgauggggguuuacagccuggacuccgcuuuuggcaccgcgcc

SEQ ID NO: 57650 - RNA, 91 nt, Mycobacterium bovis subsp bovis AF2122/97
ggcgccgucgguggcacggcgaccgcgggggcauuuucccggccgggcuugccgguggaguaccugcaggugccgucgccgucgaugggcc

SEQ ID NO: 57651 - RNA, 106 nt, Mycobacterium bovis subsp bovis AF2122/97
ggcgccgccgccgcgcccgcgcuuggucacguacggccgccgcggccgccgccgccgccgcacuaucgggcuguggugccuugcguugagcgcuggcgcuggcgcu

SEQ ID NO: 57652 - RNA, 117 nt, Mycobacterium bovis subsp bovis AF2122/97
ggcgccggugccgaaggugcccgcguuggccaacccgguguuggcaugcccgguguugaaccagccgguguugaugccgcccggguugaagccaccgguguuggugucgccggcguu

SEQ ID NO: 57653 - RNA, 76 nt, Mycobacterium bovis subsp bovis AF2122/97
ggcggagaauacaucggugucggcggcccgcucguguucagcggcaagcccguggugucgcaccggugccuucgcc

SEQ ID NO: 57654 - RNA, 127 nt, Mycobacterium bovis subsp bovis AF2122/97
ggcggcccgguucaccgcgcacaccaagcacuaccgaguggugaguaagccggccgcgcugguccauggcauguucguggcccucccggcggccaccgccgaugcguaugcgaccaccgaggccguc

SEQ ID NO: 57655 - RNA, 61 nt, Mycobacterium bovis subsp bovis AF2122/97
ggcggaucgggagcggcgguggucaacugugccaccaaguagcgcgacucccguugucguc

SEQ ID NO: 57656 - RNA, 65 nt, Mycobacterium bovis subsp bovis AF2122/97
ggaucuugcugguaugccgggccaccgaaaccaugggcaccgguggcagcggguccggcgacucc

SEQ ID NO: 57657 - RNA, 68 nt, Mycobacterium bovis subsp bovis AF2122/97
ggaucugggccacucguccggcgauggcgucggugucaccggcgcccucgacgaugguggucucgucc

SEQ ID NO: 57658 - RNA, 67 nt, Mycobacterium bovis subsp bovis AF2122/97
ggcccggcugccggcuacggcgcucccggcuacgaccagggcuaucgccaaagcggcggcugcggcc

SEQ ID NO: 57659 - RNA, 60 nt, Mycobacterium bovis subsp bovis AF2122/97
ggcaggacgcagaucagggccagcaagccggugcguccgguuaggaucaucugcgccgcu

SEQ ID NO: 57660 - RNA, 73 nt, Mycobacterium bovis subsp bovis AF2122/97
ggccacguuuuguccgaugcgguagaugucgagggccaaggcaucuaaaccgacgcgcacgagaucacgggcc

SEQ ID NO: 57661 - RNA, 66 nt, Mycobacterium bovis subsp bovis AF2122/97
ggcagagccagcgcacggaaauccacccacgacagguagguaccguccggagcguugaccucuacc

SEQ ID NO: 57662 - RNA, 75 nt, Mycobacterium bovis subsp bovis AF2122/97
ggcacgugacuauaucaccguuaucggagcgaucguguuaccgauucucuucauggugguguugaacauugugcu

SEQ ID NO: 57663 - RNA, 58 nt, Mycobacterium bovis subsp bovis AF2122/97
ggcagcagcgccaucucgcgggcguucuugaucgccugggcgacuuggcguugcugcu

SEQ ID NO: 57664 - RNA, 67 nt, Mycobacterium bovis subsp bovis AF2122/97
ggaugucggcugggcugaggucauggacagaggcaugcccgagacccaucagagccgagucgauacc

SEQ ID NO: 57665 - RNA, 93 nt, Mycobacterium bovis subsp bovis AF2122/97
uuggucgcuuucauucguugcgcgcagaccggucuuuguaugacgaugaugggaaguucuaucugccgccaaaagcagaauggcaggacgcag

SEQ ID NO: 57666 - RNA, 59 nt, Mycobacterium bovis subsp bovis AF2122/97
uugcugcugcuggccggccagcccgaggaguccuuggcuggucggaccgucagcgacga

SEQ ID NO: 57667 - RNA, 119 nt, Mycobacterium bovis subsp bovis AF2122/97
uugcaaucggacauggaccuaagugucuaagcugcgccagccacgccgucggaccuaucagcuaauucggcgcgcgucgcggcgcacuauucccgcgcgagggucuggccgggucgcgg

SEQ ID NO: 57668 - RNA, 62 nt, Mycobacterium leprae
uugccgcauugacuacgcuggcggauccagucuacuccgcaaauggcguucauaaugggugg

SEQ ID NO: 57669 - RNA, 100 nt, Mycobacterium leprae
uugacgagagcgcggugcugucgauguggauuacgacaucgacuccaucaccgaggauguucagaucggcaucgguuacuagggcugcgaucucgaucaa

SEQ ID NO: 57670 - RNA, 57 nt, Mycobacterium leprae
uuuugugcagcguguugauccaguuccauuuuggggugucuugacuguuggacagga

SEQ ID NO: 57671 - RNA, 75 nt, Mycobacterium leprae
ggccgcgacaagcuguguccgucggcagacuggaccgccucaccaccaagaucaccgauccacagcgacgccgcc

SEQ ID NO: 57672 - RNA, 57 nt, Mycobacterium leprae
gggagcucaaguucuuuggcuaacaauuuaagauggcgggagaacuccgagacuucc

SEQ ID NO: 57673 - RNA, 75 nt, Mycobacterium leprae
ggcgugacgaccugcaggucguuaucgcgaugcugaagaacgccggccgugaugucgcuuugcaguucguccgcu

SEQ ID NO: 57674 - RNA, 80 nt, Mycobacterium leprae
ggcguugucgcccuugaggaucagguucagcuggcugguuuccuucagcgccgaauccagguccuccaggcugauucgcu

SEQ ID NO: 57675 - RNA, 70 nt, Mycobacterium leprae
gguaaugauugcguaacaaccacuuccauaauccauaaccgguaagaaacuguuccacgcaguuauugcu

SEQ ID NO: 57676 - RNA, 62 nt, Mycobacterium leprae
ggguggcgaguucgcggcgcaccgaguccagaucgccggugaagccacgugaucgcacaucc

SEQ ID NO: 57677 - RNA, 65 nt, Mycobacterium leprae
gugcguugccguuauguuacggggcuggccuugcgcgaggaagagcuggacauacggacgcgcac

SEQ ID NO: 57678 - RNA, 70 nt, Mycobacterium leprae
gugaugaauuugaucuugucauuguuacgggcgcgaccgagcaugaucuuagaagcucggaauucgucgc

SEQ ID NO: 57679 - RNA, 66 nt, Mycobacterium leprae
gucuacauguugaugaugccaggggcugggcaccugggcugugcugaaggcgauaucgaugcaggc

SEQ ID NO: 57680 - RNA, 60 nt, Mycobacterium leprae
gucuuugcuaacgguuuggucuccccauaucgguggccccaucuugguuagcgggaagac

SEQ ID NO: 57681 - RNA, 63 nt, Mycobacterium leprae
gucgcguugagccucucaaugggcugcgagcgugcggguguauucuauuaagauuaacguggc

SEQ ID NO: 57682 - RNA, 97 nt, Mycobacterium leprae
gucgucggguuuugucgcggucacggugguggugaagcgcagcacugggcguccaguuacugugccgcaacuguauucacgaggauuuuccgaagac

SEQ ID NO: 57683 - RNA, 55 nt, Mycobacterium leprae
guggucggcggccugagugcugguuauccgcccugaguauuuugccgcaggccau

SEQ ID NO: 57684 - RNA, 70 nt, Mycobacterium leprae
guucggacuuuugaagcugcuggcugaggcgaauguguuucuuccggccaggucgcuuuaguauuugaac

SEQ ID NO: 57685 - RNA, 76 nt, Mycobacterium leprae
gguggcaacaugcgcacgcagcaucgcaaaaaugccgucgauggcaugcugaugcccacgcgucgacggugccgcc

SEQ ID NO: 57686 - RNA, 76 nt, Mycobacterium leprae
ggucggggaaugccauugcuggaccuaauccaggagggcaaccugggguugauccgcgcgauggagaaguuugacu

SEQ ID NO: 57687 - RNA, 55 nt, Mycobacterium leprae
gucccgcgaccgaacccaucgguagaucccucuagcugaugccaggcuccgggac

SEQ ID NO: 57688 - RNA, 67 nt, Mycobacterium leprae
gucacugcugaacaguucgucuuagccgcaggggcaguuccuggguggugggcccugugcggaugac

SEQ ID NO: 57689 - RNA, 63 nt, Mycobacterium leprae
guaaagcacacagcgucgccccuucggacuuagcauucccggcggcgagugcgguggccuuac

SEQ ID NO: 57690 - RNA, 77 nt, Mycobacterium leprae
uguccagcccacaacgcaacugagccgacguccggauaccguaacucgucggccauuggugcugggcgucugcgaca

SEQ ID NO: 57691 - RNA, 70 nt, Mycobacterium leprae
ugugacagcaacagcgcagaauuuucugcuucaccgccaggaugggauucuugccguuguagccaucaca

SEQ ID NO: 57692 - RNA, 79 nt, Mycobacterium leprae
uggaccuuaauccgacgacccugccaucggucaacggcucugauauucaguggcgaguggugucggugcggaggucgca

SEQ ID NO: 57693 - RNA, 90 nt, Mycobacterium leprae
uggccuggguauguauuggugcaaguguccugggcgugcugcuguuaaucguugaugcaguccgggaacaccagugcaucgaugcggcca

SEQ ID NO: 57694 - RNA, 60 nt, Mycobacterium leprae
ugcugaugauuggcauggcagugaaggugagagaucuucgccgccgggccugucgcagca

SEQ ID NO: 57695 - RNA, 88 nt, Mycobacterium leprae
ugcccaccguagaagcccuacguucgcgagcuucuccacaaacggcguaaacaagaccgaaggaauuugcaacguagugcagggggua

SEQ ID NO: 57696 - RNA, 86 nt, Mycobacterium leprae
ugcaucgcucaugugugaauuuaacauguugacaagcgaauccguaguucacguguuagaauuaccggagggcuaaaucagaugua

SEQ ID NO: 57697 - RNA, 73 nt, Mycobacterium leprae
ucuuguuugcgggauugucguggcgugcacgcccaaaguuggcaauuaaccccgacggucuagcaguccaggg

SEQ ID NO: 57698 - RNA, 83 nt, Mycobacterium leprae
ucugggcggauaugccgacauugccucuauaccggcagcagcgaaugcugcugaugucgaagacaauguaugcaguuaccagg

SEQ ID NO: 57699 - RNA, 60 nt, Mycobacterium leprae
ugauaucuauacgcgaccagguagaggcagauaucgcugcacuggccgccaugggaauua

SEQ ID NO: 57700 - RNA, 64 nt, Mycobacterium leprae
ugagcccgcguugcagccagcauggccacgcgaacugguugugaauagcggcagcuugggcuca

SEQ ID NO: 57701 - RNA, 75 nt, Mycobacterium leprae
ucgccggcuucgaacuugcugcacaccgugucaucggccuacugugcgauauugucggcgaguuugauccggaga

SEQ ID NO: 57702 - RNA, 57 nt, Mycobacterium leprae
ucgagugcggcccuguugcggccaccagaaccagcgucccagcagggcagcgaucga

SEQ ID NO: 57703 - RNA, 56 nt, Mycobacterium leprae
ucgaugaauucgguuuuucuaugucauuggcaugguggaaaagugugauuuauuga

SEQ ID NO: 57704 - RNA, 84 nt, Mycobacterium leprae
ucgauugcuaugauggcgguauguaauguuggucauacaauuugaucggaucgauauguacugcgcguaacuuaacgcagucga

SEQ ID NO: 57705 - RNA, 58 nt, Mycobacterium leprae
ucccggcugcgagcauuugcaacgacgaguccaugcaaccggaugauugcggcccgga

SEQ ID NO: 57706 - RNA, 129 nt, Mycobacterium leprae
ucaccaaagaacaccguggcucggugccccgggucgcugucgagccucuuguguugauguuggcgccgcuagccccacaucuggcagaagagcuguggcugcggcugggccacaccaccucuuuggcga

SEQ ID NO: 57707 - RNA, 79 nt, Mycobacterium leprae
ucaccgaugucuuccugcaugggcugauccgcgacgaauucggucgcaagaugaguaaguccagggguaacgucaucga

SEQ ID NO: 57708 - RNA, 61 nt, Mycobacterium leprae
guuggccguugcgcugcaugcuucuuuuccaccagagcguauuagcuugcacgguaacaac

SEQ ID NO: 57709 - RNA, 66 nt, Mycobacterium leprae
uacucugccaaguuguccaggcugcgggaccauucgaaucgcagauugcccacuuuggcacgagua

SEQ ID NO: 57710 - RNA, 70 nt, Mycobacterium leprae
uacgcaacgugggguugcauuucaucugucgcgacgugugguugcgggugauaucgaccucgacggcgug

SEQ ID NO: 57711 - RNA, 73 nt, Mycobacterium leprae
gcgacagucuucuggacguaccguucuuucgcgacaucgcgaaggaaugcaggcuucagucgcuauuguucgc

SEQ ID NO: 57712 - RNA, 119 nt, Mycobacterium leprae
gcgaucgcgguucugggugcguuguuggcaaucucggagaugaucaauaugcccgccggcuucucgaucgguugggcuaugugguucauucugguuugcagcgugcuccaagcgauugc

SEQ ID NO: 57713 - RNA, 76 nt, Mycobacterium leprae
gcgccucgaauucgauugggucacccaggacgguaccggugccaugggauucgacguaguucacgcuuucgggcgc

SEQ ID NO: 57714 - RNA, 106 nt, Mycobacterium leprae
gcgcgacugguccaacgaucgcgaaaacugcugcugccaggcaugcgguggaacguaaaaaagacaucgugugugcagaguaggcgaucgggcgucuaguuagcgu

SEQ ID NO: 57715 - RNA, 69 nt, Mycobacterium leprae
gcgggccuucugagugauccgcacgauggcguccucgacgucacgcggcgcagucaucaucaggucagc

SEQ ID NO: 57716 - RNA, 104 nt, Mycobacterium leprae
gcgggcacuagaccagcugaauugauccuggcuggcccugccugugcgcgguuguucgucgccagugcgcuggcuaggcugggucccuugcuggugguuaccgc

SEQ ID NO: 57717 - RNA, 91 nt, Mycobacterium leprae
gcgguaucggcuugucagucaacuagcuuggcuucuccucacuccgcugagcggagugaggagaagccaagcuaguugacuuuaguaccgu

SEQ ID NO: 57718 - RNA, 120 nt, Mycobacterium leprae
gcguagaaaucucuauagcgcgcccgucgacucuagcaugccgguaggguuugugcggacgacacaccaccacgcaagcaguaguggcggcaucggccagccuaucgagguaauugcagc

SEQ ID NO: 57719 - RNA, 55 nt, Mycobacterium leprae
gcggugucugcucggagccaacucaggucuggguaucucauugggcgacgacugc

SEQ ID NO: 57720 - RNA, 66 nt, Mycobacterium leprae
gcgugagaaggugcgccagcgcagccgcacuaccgaggugaugcuggcgggcgcgaccguccgcgc

SEQ ID NO: 57721 - RNA, 111 nt, Mycobacterium leprae
gcgguucacucggugccgguagguuuugcgauucgcugacguggacgugcuggugcgugucgcgccaagcugcuccggucggugcugguaccugcugacgcuucuguucgc

SEQ ID NO: 57722 - RNA, 59 nt, Mycobacterium leprae
gcugguagcgaugucgagccuggcgacgaugcaggccgggcagugcagggagcuacagc

SEQ ID NO: 57723 - RNA, 94 nt, Mycobacterium leprae
gcuggcacgucgugaacgcugacccguuggagacugacgcugcucuuccugagcaguuucggauucgccgggacaagcgugcucguuuguuggc

SEQ ID NO: 57724 - RNA, 59 nt, Mycobacterium leprae
gcugcgaggcgaucgucugccgguucaccuaucuggugcugcugaugaucgcauccagc

SEQ ID NO: 57725 - RNA, 63 nt, Mycobacterium leprae
gcugcgauggucucuaaccaccgcccuacucgagcucacggugauagugcugcuguuggcagc

SEQ ID NO: 57726 - RNA, 63 nt, Mycobacterium leprae
gcucaguucagacuaguaauuagaguuacaaacguagguucgugaccuagauaugaccugagc

SEQ ID NO: 57727 - RNA, 66 nt, Mycobacterium leprae
gcuagcugaacugacuacgcucagagcguaucauacaugacaugccucugccgucaguuugcuggc

SEQ ID NO: 57728 - RNA, 55 nt, Mycobacterium leprae
ggaagaauggcuaccacgucgaucaugugcucacgauggugcgccagcuuuuucc

SEQ ID NO: 57729 - RNA, 76 nt, Mycobacterium leprae
ggaagccuaccgacucacugagcaaggugcguucgacgugaccguucgcccugcucaguagucggacccgguuacc

SEQ ID NO: 57730 - RNA, 61 nt, Mycobacterium leprae
gcuuuuggcuugacgugcuuuagcuccggaccucacccaggccagcucgucagucaaucgc

SEQ ID NO: 57731 - RNA, 69 nt, Mycobacterium leprae
gccgcgggguugcuggauugcccuggugcgauguucaccgcgagccacaauccggcggccuacaacggc

SEQ ID NO: 57732 - RNA, 65 nt, Mycobacterium leprae
gcaugguaugugguguugagacauucccagguuucacuggaugucacuucccgugccgauuuugc

SEQ ID NO: 57733 - RNA, 86 nt, Mycobacterium leprae
gcaugaucacaagcaccgacaagcgguccuguaggcagcgcgugagcuucuggaggagaggucgcauguuggagcugucgguuagc

SEQ ID NO: 57734 - RNA, 60 nt, Mycobacterium leprae
gagcugcugcuagggcacccguugcucggcagcgacgaucacacgguggccagcagccuc

SEQ ID NO: 57735 - RNA, 55 nt, Mycobacterium leprae
gaggaugaagucgacgagcuacugcgcagcggaacguugguugaccuuuauccuu

SEQ ID NO: 57736 - RNA, 89 nt, Mycobacterium leprae
gaguaguacaggaugccgauuucgauuucggggaauucgaaaaccuucguggaguuggcgaucccgaugucggcggcgaguacuaacuu

SEQ ID NO: 57737 - RNA, 70 nt, Mycobacterium leprae
gaguagcugauagacggcggcaguggcgacauugaguucguccacccucaucguagucuaccggguacuc

SEQ ID NO: 57738 - RNA, 106 nt, Mycobacterium leprae
gauggugagcgccucggugacggcaggaguucuagucggcggauugaccaugaucaccuugauccugcucggcguggugcucggcgcguugguggcguucaucauc

SEQ ID NO: 57739 - RNA, 71 nt, Mycobacterium leprae
gcaggcuguugcggacgccgcgcaccaagcugguaucgugagcagcuucccugguguagcgcacacccugu

SEQ ID NO: 57740 - RNA, 75 nt, Mycobacterium leprae
gcagagcgcugcgguuccgcuacccagucgaucagcgacgaagcugcgcugauggugucgggcggcagcgauugc

SEQ ID NO: 57741 - RNA, 82 nt, Mycobacterium leprae
gcacgucgaaaaauguuuuauuuaacuagacauccaggaaacgaacauccuuggcauuacgggugauaaagcuacggcgugc

SEQ ID NO: 57742 - RNA, 129 nt, Mycobacterium leprae
cggaggauuaccaagauguacucggguaacggucuugcgguacgagugauuccuugccuggacgucuauugugggcgugugguuaaaggggucaauuucaagaaccuccgggaugcgggugaucucgug

SEQ ID NO: 57743 - RNA, 79 nt, Mycobacterium leprae
cgcuacguacgcggccagguaucaggaaagcaucgcuggagcugugauuauucuugacuugcuugcgcguauauggacg

SEQ ID NO: 57744 - RNA, 82 nt, Mycobacterium leprae
cgccuucagcuuugccucuaccguuucagcgguguccggagauccgaugaucggcagcggugggggauccagcgcgaaggug

SEQ ID NO: 57745 - RNA, 76 nt, Mycobacterium leprae
ccggcaagcagcgcacugaguuuaugcaguguuccgguuugaucgggaagugcgaagucagucgcggugucaucgg

SEQ ID NO: 57746 - RNA, 94 nt, Mycobacterium leprae
ccggaucugaacuacgacaaugugaacgugcaagaagcgaggaucgauuuucuccucuuuugacuugucauguucaucgacgggguucagcugg

SEQ ID NO: 57747 - RNA, 85 nt, Mycobacterium leprae
ccgguaugagugaugaggagaugaagcgcuuucccgaagagcuugggaaaaugggcuucgucuucaacuucauuaccuauggcgg

SEQ ID NO: 57748 - RNA, 69 nt, Mycobacterium leprae
ccggguugucuuuggcuucggguagauuggacacgacguucuuauccaaagugcguggagccaacccgg

SEQ ID NO: 57749 - RNA, 80 nt, Mycobacterium leprae
cucgacagucagugacucgagcgauacaucaauaacccuggcgcggaacaaguguaccgcuucgauuaccuggcugcggg

SEQ ID NO: 57750 - RNA, 66 nt, Mycobacterium leprae
cuggcacccagggccugcugucagcaucguacuuguucgaugaccacgacggccaccugaugccgg

SEQ ID NO: 57751 - RNA, 84 nt, Mycobacterium leprae
cuggaucgucgccucgaugucauccggauagugguuggacccauccacgaccaagagauccuugauacgacccgugaugaacag

SEQ ID NO: 57752 - RNA, 84 nt, Mycobacterium leprae
cugaucgcaaugccgguuuucggcggggccaaucagcgucgcagcgcugcgaugugguuggcagcgcuggaaacggcacgacag

SEQ ID NO: 57753 - RNA, 80 nt, Mycobacterium leprae
cugacgaauccgguacccggcuacgcaaggaucucacuuggcgggaucuaggcaguuuucgggguaucggugguugucgg

SEQ ID NO: 57754 - RNA, 85 nt, Mycobacterium leprae
gacuggugccuuaagcugguuuugguccuggggcaggaagcguucgguuggcuugcccgggaucggcgcccaccuuggcccaguu

SEQ ID NO: 57755 - RNA, 65 nt, Mycobacterium leprae
gacaggagcacgguaacucggugcuacgcuuccauaugacgugggguaccgugcccgcuuugguc

SEQ ID NO: 57756 - RNA, 71 nt, Mycobacterium leprae
gacgacaaauuccugggacagguacugcuggacgaagcuaagaagcuaaucaguggccguccgauuugguc

SEQ ID NO: 57757 - RNA, 55 nt, Mycobacterium leprae
gacagaaaguugaucgugggcaaucgugauaucgcccaugaugacguaccuaguc

SEQ ID NO: 57758 - RNA, 64 nt, Mycobacterium leprae
cuuagaugaccaaagauccgucgcugucucggcugagaguacacgauggggguugaucuuugag

SEQ ID NO: 57759 - RNA, 56 nt, Mycobacterium leprae
cuucacucaacgggccaagugggcuaacgccaccgccgaccugcucgaagcugaag

SEQ ID NO: 57760 - RNA, 72 nt, Mycobacterium leprae
gaaaaugacgaugucgccgggcuagaugucaggugcgacuuucuccgaauccucggcgacguagugauuuuc

SEQ ID NO: 57761 - RNA, 64 nt, Mycobacterium leprae
aaauauuuugggcaagcaacagcgacggcgacucgccaccgccagugucuugucgaacuuauuu

SEQ ID NO: 57762 - RNA, 100 nt, Mycobacterium leprae
acgcugguagcugccggccauggcagaucgggauuucuguuggcaccauggacagcugagcagaucauguucgaacuugccgcggucggagcccaagcgu

SEQ ID NO: 57763 - RNA, 83 nt, Mycobacterium leprae
accuugauagccauccuggugagcuuucuucaugccuuggaacuccacgaagaaaccgcuggccuauggccauugcucagggu

SEQ ID NO: 57764 - RNA, 94 nt, Mycobacterium leprae
acggcauugucggcaucaucggccccaacgggguuggcaagaccacacuuuuuaaaaccaucguggggcucgagcagccggacggcggugcugu

SEQ ID NO: 57765 - RNA, 76 nt, Mycobacterium leprae
acggcccgcagccaggcagcugcuaggcggauguugcacgacagugacugcuuccaguugcuuggcuuuggggugu

SEQ ID NO: 57766 - RNA, 57 nt, Mycobacterium leprae
accgggaaugcacgaugccuaacgcgcuagucagccguucaucuugcaagucccggu

SEQ ID NO: 57767 - RNA, 57 nt, Mycobacterium leprae
accgcgaucgagcuugcuccuggggcguugccgcagcgucaggggcuucgaugcggu

SEQ ID NO: 57768 - RNA, 78 nt, Mycobacterium leprae
acaagaaauguucgaaguaguucgcgguaucuauaucuauccgauccgcagcuucgauauaucgaauaucaccuucgu

SEQ ID NO: 57769 - RNA, 60 nt, Mycobacterium leprae
aaugcuguguuucaaccguauuggguaagggcguccggaugcaaugcugagacauaaguu

SEQ ID NO: 57770 - RNA, 101 nt, Mycobacterium leprae
agguaaccaagccccaggugagcugaugagcacgcgggcgggacgccgaguugcgaucagcgccggcagccucgcaguacugcugggggcucuggacaccu

SEQ ID NO: 57771 - RNA, 129 nt, Mycobacterium leprae
agcgccaggguacagauugccggcguauuguauguuugguuuuucaggcuauucucuaccgcgauuggcagcgaaagaaagucaggaacccagcgaccggacgcaguaauggagucgacccgggccagu

SEQ ID NO: 57772 - RNA, 80 nt, Mycobacterium leprae
agcugggcugucaaggaugccaucgaguguggcgaacuugccagcuacaucgaugcguaucccuugaccgagaccuugcu

SEQ ID NO: 57773 - RNA, 57 nt, Mycobacterium leprae
agcugcgccccccgaaaacuaccucgucgcggguugaggcagugaucugggccaguu

SEQ ID NO: 57774 - RNA, 60 nt, Mycobacterium leprae
caccgggcacaccuguggcuuuucgcuaacugggguuuucugcuugaggguuguccggug

SEQ ID NO: 57775 - RNA, 114 nt, Mycobacterium leprae
cagaguuuguucccaaaugaucagaccuugcggcuuagucggcgcgggcauggguaauacgucggucuuguccggccaagcuaggaggucgcauuucucgggcagcggcgucug

SEQ ID NO: 57776 - RNA, 63 nt, Mycobacterium leprae
caaaugcuaugauaauuuggcugauaauaucgcuuaucaugcauccuccuaucguggcagcug

SEQ ID NO: 57777 - RNA, 67 nt, Mycobacterium leprae
caacaucucggggugcaacuuggcccgaaacccguuuaacgggaaccgaguugacaucgggauguug

SEQ ID NO: 57778 - RNA, 65 nt, Mycobacterium leprae
caacuuuugguugucgucuggcgucaggucgaaguaguuccugccgcugggcuguagccggguug

SEQ ID NO: 57779 - RNA, 86 nt, Mycobacterium leprae
cacacgucgucaucaucgggcgcgguguuacgguuggucgcccguuggggcugcugcugacacgccguuccgagaacgccacggug

SEQ ID NO: 57780 - RNA, 80 nt, Mycobacterium leprae
aucgacuggcgagucaguuccuuagcgaugccgcauggcgacgggaauggcuuuuggcugaaacugaccgaccauucgau

SEQ ID NO: 57781 - RNA, 68 nt, Mycobacterium leprae
auggggguguucggugucaaccucguuggccuaagcgccgguucaucccaagacaccagcacuuacau

SEQ ID NO: 57782 - RNA, 63 nt, Mycobacterium leprae
ccaccaucaccggcaguuuagaacucagggaauucaaaaccggaguggcccggaugauagugg

SEQ ID NO: 57783 - RNA, 66 nt, Mycobacterium leprae
ccaacgcagguaccgaaugacaucagcgucggagguguugaugaaguauugguaccaggcguacgg

SEQ ID NO: 57784 - RNA, 109 nt, Mycobacterium leprae
cauccugccgcacuucgacacccugcucaucaugucgguggaaccuggcuucggaggccaggcauuuauccccgaagugcugaguaaggugcguacaguacgcaagaug

SEQ ID NO: 57785 - RNA, 83 nt, Mycobacterium tuberculosis CDC1551
cauauuccgaaucccuugugaaguaguaaugugcgagcugagcgaugucgccgcucccaaaaauuaccaaugguuuggucaug

SEQ ID NO: 57786 - RNA, 79 nt, Mycobacterium tuberculosis CDC1551
caucgcggcccagguagugcacaccgacaacagcgucaucggcuaugacgcguuggugaucgcauuaggugcggcgcug

SEQ ID NO: 57787 - RNA, 61 nt, Mycobacterium tuberculosis CDC1551
cagucguggauuugccagggggccaguacgaagcugaacggcgcuccuuggacuacggcug

SEQ ID NO: 57788 - RNA, 86 nt, Mycobacterium tuberculosis CDC1551
cagcagacgaugacggccgacuuggcagcaguggagcaacacacgacugaucgccacacuggccagcgcgcgccacauguccgcug

SEQ ID NO: 57789 - RNA, 55 nt, Mycobacterium tuberculosis CDC1551
cauuggcaccggaaaucgccgguacccauguugccgguggucgcggucgccgaug

SEQ ID NO: 57790 - RNA, 81 nt, Mycobacterium tuberculosis CDC1551
ccacguccaggccgcgcucgacuagccggguggucagcuugccggugcccgcucccaggucgagcacgcggcgggcggcgg

SEQ ID NO: 57791 - RNA, 59 nt, Mycobacterium tuberculosis CDC1551
ccagcacucggucgaugaucuugacuugaucggauucgucgauacugaguuguucaagg

SEQ ID NO: 57792 - RNA, 63 nt, Mycobacterium tuberculosis CDC1551
ccacgagcguaacggcacugcgaaaagccgggccggaaauucgcaguggcguuacauucgcgg

SEQ ID NO: 57793 - RNA, 56 nt, Mycobacterium tuberculosis CDC1551
ccaggauggcggugcccggaucgucagcguggugacugagcagcggcguuuucagg

SEQ ID NO: 57794 - RNA, 55 nt, Mycobacterium tuberculosis CDC1551
cccagcggaaauugguugagcgcaugaucacgucgccauauaccagaucgcuggg

SEQ ID NO: 57795 - RNA, 78 nt, Mycobacterium tuberculosis CDC1551
cccgaaacugguugugccgauagccgugaagcccuccgcgagguaggccagggccgacggcacaucccaggcguuggg

SEQ ID NO: 57796 - RNA, 59 nt, Mycobacterium tuberculosis CDC1551
augguuucguggcugacauugcugaagguaaggcacgcaagaccagguacguggaccau

SEQ ID NO: 57797 - RNA, 64 nt, Mycobacterium tuberculosis CDC1551
augguuuuggccagcuuugucgucgugggaguggggccacgcacccuugggcgccagaacgcau

SEQ ID NO: 57798 - RNA, 109 nt, Mycobacterium tuberculosis CDC1551
auugguuugugucugagccguugaggcggcuggcugguuugggguugcgaugauuuuggauuuuucgugguugccgccggagaucaacucggcgcggaucuaugccggu

SEQ ID NO: 57799 - RNA, 75 nt, Mycobacterium tuberculosis CDC1551
aucggccucgaccaucaggaccuccgguuccaugcgggcuugcggaaagugacggucugaugcgagguaaccgau

SEQ ID NO: 57800 - RNA, 70 nt, Mycobacterium tuberculosis CDC1551
aucguguugacucugcguccaccaggcggguuacucgcacuuuugcgugguggacgcagagucaacggau

SEQ ID NO: 57801 - RNA, 73 nt, Mycobacterium tuberculosis CDC1551
aucaucaggcgcgacauaucgagaccgcgcgcuacaugaucgcgauaacgucgaagguguugagcuuguugau

SEQ ID NO: 57802 - RNA, 73 nt, Mycobacterium tuberculosis CDC1551
caaccgcgccgccaaugcagcguccguaccauguggacuacggugcugauguugacucugguggcgacggcug

SEQ ID NO: 57803 - RNA, 63 nt, Mycobacterium tuberculosis CDC1551
aucgaccagcucggccuucucgagaucacgcgccauggucucggccgucgcgagcuccucgau

SEQ ID NO: 57804 - RNA, 58 nt, Mycobacterium tuberculosis CDC1551
caccucgcugaugauccaugacaucggcgccaucguggaauggaucucggcgauaaug

SEQ ID NO: 57805 - RNA, 67 nt, Mycobacterium tuberculosis CDC1551
cagauucgaagugacggccugggucuuggagaucuucuuggacuccagccguucacguucgagcaug

SEQ ID NO: 57806 - RNA, 67 nt, Mycobacterium tuberculosis CDC1551
cacuucgucaaggugaugccgcgugacuacaaacggguccugcaggcgaucgcccuggcugaacgug

SEQ ID NO: 57807 - RNA, 56 nt, Mycobacterium tuberculosis CDC1551
cacuguugaucaugggccuggcaaccgugacugucgggcugguuccaacgacagug

SEQ ID NO: 57808 - RNA, 75 nt, Mycobacterium tuberculosis CDC1551
cacuggcauugcucgcggccauccugucgcgccgcuguaggcgggugguguugauugcggcgguaguggacggug

SEQ ID NO: 57809 - RNA, 89 nt, Mycobacterium tuberculosis CDC1551
caccgaccucgggcgggcgcugucgauacagcgucagcacggguuuacgugugauggagugaucggcagccacagccgcuagguuggug

SEQ ID NO: 57810 - RNA, 68 nt, Mycobacterium tuberculosis CDC1551
cacccggucgcugagcacccuggccagcaccuugcgugccaccgccagcagcucggcgauaucgggug

SEQ ID NO: 57811 - RNA, 67 nt, Mycobacterium tuberculosis CDC1551
caccagcucaucgccguagcugaggaccgcgaucccggugcucagcugcagugcggugggcgggaug

SEQ ID NO: 57812 - RNA, 65 nt, Mycobacterium tuberculosis CDC1551
cacgaucugccaugucauuccuggacuccuuugcugggucggggaguacgcgggccaggugcgug

SEQ ID NO: 57813 - RNA, 56 nt, Mycobacterium tuberculosis CDC1551
agagcgcgauccaggcgagaggaccugguaacgucgcugucccgaggucacgcuuu

SEQ ID NO: 57814 - RNA, 57 nt, Mycobacterium tuberculosis CDC1551
agcacuucucagcggcccgagcgaaaugccgcuccugggcgaccgcgacgaaguacu

SEQ ID NO: 57815 - RNA, 106 nt, Mycobacterium tuberculosis CDC1551
agucagagcgcuggccgcggcgccuggcgcgcagcacggccugcagugcgucgcgggcacgcgcugugauuggcgcgaccacgccgcggucgguagagcucuggcu

SEQ ID NO: 57816 - RNA, 83 nt, Mycobacterium tuberculosis CDC1551
agucagauucgcgagccgccaccgcuaccacccgugcugcucgagguguggccggugaucgcggucggcgcgcucgccuggcu

SEQ ID NO: 57817 - RNA, 62 nt, Mycobacterium tuberculosis CDC1551
aguggucaugaauggcgaaugggcacgcauacacgucacccaccgggucgaucaggcacacu

SEQ ID NO: 57818 - RNA, 61 nt, Mycobacterium tuberculosis CDC1551
agguucgguuacuaagggccagcgcggcacgcaaacuguugcacugacuagugaagaaccu

SEQ ID NO: 57819 - RNA, 128 nt, Mycobacterium tuberculosis CDC1551
aguuguacucgucgggcgucagcaccgcggggcccgccaacaaggugccguccggguuuaugacgccgucgccggccuugaccgccuugauggcggccugcacaucuuugcccagccgugguccggcu

SEQ ID NO: 57820 - RNA, 102 nt, Mycobacterium tuberculosis CDC1551
accgaguugcucaaaucggcagcagcggacaucaauuacgugcuggcgcuggcgcuuuucguguucgucugcuaccacacggccgguauuuggcggcgcggu

SEQ ID NO: 57821 - RNA, 88 nt, Mycobacterium tuberculosis CDC1551
accgcauacccgaccugccagggcgccaagcucaccugaucgaacgccgcgccgagcaagagcagcggccccuggguggggaugaggu

SEQ ID NO: 57822 - RNA, 56 nt, Mycobacterium tuberculosis CDC1551
accucgcugcgggaugggucgcaccacaaacgccaccaauucaccaaggacgaggu

SEQ ID NO: 57823 - RNA, 88 nt, Mycobacterium tuberculosis CDC1551
accugcacccggacggcacggcauucacuuacaucgauuacgaacgggauucggagggcauaagugaaagccugacguggucgcaggu

SEQ ID NO: 57824 - RNA, 58 nt, Mycobacterium tuberculosis CDC1551
acgcauucggcgaaggcccgcgacuccuuggaguugcgcagcgaucgcaugacugcgu

SEQ ID NO: 57825 - RNA, 116 nt, Mycobacterium tuberculosis CDC1551
aacugcaaugccacauccaggucggccuucuucagcauggcgaugacggccugcaggucgucgcgcuucuugcuggugacccggaccucgucgcccuggaucuggguuuugacguu

SEQ ID NO: 57826 - RNA, 85 nt, Mycobacterium tuberculosis CDC1551
aacgcgguuugcgccgccgcuuggcaacacugcggcccagccccggcgauagcuuggccgcugcgacaagccggcgccgcgcguu

SEQ ID NO: 57827 - RNA, 85 nt, Mycobacterium tuberculosis CDC1551
aagcgagcguauucucggggaggcccucggcgacgaccgcaccgagguggugguggcuagcaaggucuucccggucgcgccguuu

SEQ ID NO: 57828 - RNA, 87 nt, Mycobacterium tuberculosis CDC1551
aagccaucgggaaauguccauggggucagucuugcgcagcggcauccuguugcgccagcgccucccgcaggauccguccgguggcuu

SEQ ID NO: 57829 - RNA, 101 nt, Mycobacterium tuberculosis CDC1551
aagggcguucgaaugagcauguugguguccgccgacgccaagucgaugccgcuggcgguacacguguucggguugggcacccgcgugcugaacaagcucuu

SEQ ID NO: 57830 - RNA, 89 nt, Mycobacterium tuberculosis CDC1551
gaagagcgaugaggauaccccgggcggugucgagaacgcggccagaguucgagccgcucgagauugcagcgggcccucgauucgccguc

SEQ ID NO: 57831 - RNA, 61 nt, Mycobacterium tuberculosis CDC1551
gaaggcaccagagagaucaccucggaguugaugcgacgcggcgagcucgucauggucuuuc

SEQ ID NO: 57832 - RNA, 55 nt, Mycobacterium tuberculosis CDC1551
cuucagcuggccgucauagguccagauucgguccuugggcagaugccagcugaag

SEQ ID NO: 57833 - RNA, 100 nt, Mycobacterium tuberculosis CDC1551
gacaccgaaccaccguggauuugccgaccgcggaaggaccggacagcaccaccacacgucccacugccgccgguuggccacgcgcggugggcuugguguc

SEQ ID NO: 57834 - RNA, 90 nt, Mycobacterium tuberculosis CDC1551
gacaaggcgggcgcggugcgggugcugcggcuggugcucgccgaguuaagugaggaaucaccgugagcagcccagcguuccggcguuguc

SEQ ID NO: 57835 - RNA, 56 nt, Mycobacterium tuberculosis CDC1551
gaaugcgcagugccuggcugcguugcuugaacgcggccagcagcgucuuggcauuc

SEQ ID NO: 57836 - RNA, 76 nt, Mycobacterium tuberculosis CDC1551
gaagugcuggcucagccgccgggcuugccugcggccaagaaucugaccccgcaccgguggcugaugcgagagcuuc

SEQ ID NO: 57837 - RNA, 66 nt, Mycobacterium tuberculosis CDC1551
gacagccaggccgucgcgaccaugcucgccgugaucgggguggauucgcucgaugaccuggcaguc

SEQ ID NO: 57838 - RNA, 75 nt, Mycobacterium tuberculosis CDC1551
gacuguccuguggcucggugguugguugccgaucacccgguguuuggcucagauugccggugccgcaugaugguu

SEQ ID NO: 57839 - RNA, 86 nt, Mycobacterium tuberculosis CDC1551
gacgugcgcggccgacggucagcuguguccgcacaaccgggcacccucggugacggacugcacagcgauggaccgcguaacccguu

SEQ ID NO: 57840 - RNA, 62 nt, Mycobacterium tuberculosis CDC1551
gacggcuggcucggcgacuggacuaucuucuacugggguugguggaucagcugggcuccguu

SEQ ID NO: 57841 - RNA, 127 nt, Mycobacterium tuberculosis CDC1551
gacgacggugucgauguucagcgucaaguuguccucggugaucaccgguugcggcggaaacgacaccacccgcucgcgcagguccacccgagcccggacgcggucgaugaacggcaccaacagcguc

SEQ ID NO: 57842 - RNA, 66 nt, Mycobacterium tuberculosis CDC1551
gaccgccgugguggugagcaccaacggugccaucucgguccgggugaauaccgccaugucacgguc

SEQ ID NO: 57843 - RNA, 56 nt, Mycobacterium tuberculosis CDC1551
gagaacugaccgugguuacgcaugagcuauugguuaaggcggccggggcggugcuc

SEQ ID NO: 57844 - RNA, 87 nt, Mycobacterium tuberculosis CDC1551
gagacacggaucgcgcgucucggcgaguggggcgcagucgggcuauauguuucauucagacgagaggcgugaacacccugaaaucuc

SEQ ID NO: 57845 - RNA, 55 nt, Mycobacterium tuberculosis CDC1551
cucccggcuggugccgcacaagcagaucgaggacgcguuggcagcggucgcggag

SEQ ID NO: 57846 - RNA, 61 nt, Mycobacterium tuberculosis CDC1551
cugguuaggcgggacggggaguguuacugcuugacugcuccuugggacgucuguugcacag

SEQ ID NO: 57847 - RNA, 73 nt, Mycobacterium tuberculosis CDC1551
cuguucuucggugagaucucuggugcgcagaucccggucaaugccgguggccgccaggauuucguucgagcgg

SEQ ID NO: 57848 - RNA, 79 nt, Mycobacterium tuberculosis CDC1551
cguugccagcaaucgcaaagcccggcacaacuauucgaucaucgagguguucgaggccgggguugcgcugcaaggcacg

SEQ ID NO: 57849 - RNA, 81 nt, Mycobacterium tuberculosis CDC1551
cguguggugggcgcuggcggucaucgucguugccggacucaccguuaccgccaggaugacgccgcagcgcucgcuuacgcg

SEQ ID NO: 57850 - RNA, 69 nt, Mycobacterium tuberculosis CDC1551
cguugggggugaccugcgcggcagggucaucugccgaggugaccaauacacggagguucugccccagcg

SEQ ID NO: 57851 - RNA, 129 nt, Mycobacterium tuberculosis CDC1551
cgucguggucaccggccgggucaccgacgccucgguggucgucggggcggcggccgcgcacuucggcuggggccgcaccgacuaccaccgacuggccggcgccgugguggccgggcacgugaucgaaug

SEQ ID NO: 57852 - RNA, 59 nt, Mycobacterium tuberculosis CDC1551
cggugguggccaccgcagugggugugaucuugucgaucggcucggugaccagccgcacg

SEQ ID NO: 57853 - RNA, 55 nt, Mycobacterium tuberculosis CDC1551
cguggaauuucuucgccauggggggcggauugccauggcgcacagaggauuuacg

SEQ ID NO: 57854 - RNA, 93 nt, Mycobacterium tuberculosis CDC1551
cgucagcggacauguggcgcgcgcuggccaguguggcgaucagucguguguugcuccacugcugccaagucggccgucaucgucugcugugcg

SEQ ID NO: 57855 - RNA, 69 nt, Mycobacterium tuberculosis CDC1551
cggugggcgcgccgccgcguggcgauggcgguuaccgcgcugcuggguuaccugguggcggccucgccg

SEQ ID NO: 57856 - RNA, 59 nt, Mycobacterium tuberculosis CDC1551
cgguucuuggccaggccgcugaccagcugcugcagcuggucgacacuggccgaaaauug

SEQ ID NO: 57857 - RNA, 69 nt, Mycobacterium tuberculosis CDC1551
cguccgccaucaccggcggcugggaggauuucacggucgucgucaccugcacggugguugccucggacg

SEQ ID NO: 57858 - RNA, 58 nt, Mycobacterium tuberculosis CDC1551
cgucgccggucucccagucgaagaugugauugucgcucuuucccuccagaucggugcg

SEQ ID NO: 57859 - RNA, 62 nt, Mycobacterium tuberculosis CDC1551
ccgggcgcacgcuaucgggccauggagcaguuuuucgccgccagccauagcggagugccggg

SEQ ID NO: 57860 - RNA, 68 nt, Mycobacterium tuberculosis CDC1551
ccggcgaucgcagccacggaguucgauuaccuggagaugugggcucaggauguggcugcgaugguggg

SEQ ID NO: 57861 - RNA, 63 nt, Mycobacterium tuberculosis CDC1551
ccggcuucugcaccagcgggucaaccagggcgugguagcgguugacccacugggccgagucgg

SEQ ID NO: 57862 - RNA, 130 nt, Mycobacterium tuberculosis CDC1551
ccggcuggcaucgauacugcgcgauguccuuccugccgaggaggaacccgacggcgcgcugacgguucgccaugacgguacguuugccucguugcggguagugagcaucgcugaggaccucgagcuggug

SEQ ID NO: 57863 - RNA, 57 nt, Mycobacterium tuberculosis CDC1551
ccggaucuggcccguucgaucaggacagcguugaucgcguccugggccauggcccgg

SEQ ID NO: 57864 - RNA, 81 nt, Mycobacterium tuberculosis CDC1551
ccgcgcuguuugacgucagcgccgcccggucgcugcucgaccggccuacggcgcgggcggugcugagucgcuucggcgcgg

SEQ ID NO: 57865 - RNA, 75 nt, Mycobacterium tuberculosis CDC1551
ccgcggggaccaugcaucggaagaaccggcaugacaauguucaggccgaguucgucaugcagcuuccaggcgcgg

SEQ ID NO: 57866 - RNA, 73 nt, Mycobacterium tuberculosis CDC1551
ccgaaucgaucgcgauggcggccagcgcggacgccgacaauccgugucuggccgacgccaucagcgauccagg

SEQ ID NO: 57867 - RNA, 96 nt, Mycobacterium tuberculosis CDC1551
cccgggugcuggcgaucuggccggacugggugcggcgguggcccacgccgucggccaccgccacggccagcaccgccgauguguuacgcgccuggg

SEQ ID NO: 57868 - RNA, 71 nt, Mycobacterium tuberculosis CDC1551
ccgcaccgccggccugucccacgaucuucgacaccgcagcgauaucgucgucgugggcauccggggugcgg

SEQ ID NO: 57869 - RNA, 55 nt, Mycobacterium tuberculosis CDC1551
ccgcccggcugcgcgagcugggcccaugacggucagcuacggcgcacccgggcgg

SEQ ID NO: 57870 - RNA, 82 nt, Mycobacterium tuberculosis CDC1551
ccgccgacgacgcgggacagcuuggucuuucgcggcacccggaucucggugccggccuugcggaugaccugccagucggugg

SEQ ID NO: 57871 - RNA, 59 nt, Mycobacterium tuberculosis CDC1551
ccgacgcgcugccgagcgaacccgagcaggacggguucaucaaggacgcgugcacccgg

SEQ ID NO: 57872 - RNA, 92 nt, Mycobacterium tuberculosis CDC1551
cgaccccaccgagcgggugguggucgccaacgccgaccaacugcugaucguggucgcgcuggcagacccgccgccacgcaccggccuggucg

SEQ ID NO: 57873 - RNA, 63 nt, Mycobacterium tuberculosis CDC1551
cgagauuccccgccgaugcugucaaggcagccugcuuggacaccauuccguugggaugacucg

SEQ ID NO: 57874 - RNA, 129 nt, Mycobacterium tuberculosis CDC1551
cgaccucugccugucgagcuggcugcuggccaugucgguccuuccagcacggggcagaacgcgaugucccgacuguagguaaggcgcugacgggaugcaaaucgcuugccggacgacggcucgccguug

SEQ ID NO: 57875 - RNA, 79 nt, Mycobacterium tuberculosis CDC1551
ccuguagcgcgagcagacgcaaaaucgcccgaaagccaucgguuucgggcgauuuugcgucugcucgcgccaacauagg

SEQ ID NO: 57876 - RNA, 68 nt, Mycobacterium tuberculosis CDC1551
ccuacaccuggcgugcuaucgcgcauucgacgacauuggcagcgugauccacagccacccgguguggg

SEQ ID NO: 57877 - RNA, 86 nt, Mycobacterium tuberculosis CDC1551
ccugcagcggcgccgccguugcgugagucugccgcggugcgaccggaggccaggcuggugucggcgguggcgccagcucccgcggg

SEQ ID NO: 57878 - RNA, 86 nt, Mycobacterium tuberculosis CDC1551
ccugcgaccacgucaggcuuucacuuaugcccuccgaaucccguucguaaucgauguaagugaaugccgugccguccgggugcagg

SEQ ID NO: 57879 - RNA, 103 nt, Mycobacterium tuberculosis CDC1551
cgcgacucaggugaucggaugcguuggcagcgugaaguguucgggcggcaccgucgggccgcucgggggccgcgucgccaguggcgucgugaucccgucgacg

SEQ ID NO: 57880 - RNA, 70 nt, Mycobacterium tuberculosis CDC1551
cgccggccagcuggugagcggccaccacccgccgguugaguucggaggccagcucggccagcuggacgcg

SEQ ID NO: 57881 - RNA, 58 nt, Mycobacterium tuberculosis CDC1551
cgccucccgccgugugucgcgggcuugcccguggaguuccgugaauuggcgguaggug

SEQ ID NO: 57882 - RNA, 57 nt, Mycobacterium tuberculosis CDC1551
cgccggcccaggcccgugaccuggugaccgagaccggggcucgagggcuggccggug

SEQ ID NO: 57883 - RNA, 82 nt, Mycobacterium tuberculosis CDC1551
cgccggcgcguccggaucgucgaugguagcguucgcgacgacggacagcaugucgucggcagguucggcgcguuuaccggcg

SEQ ID NO: 57884 - RNA, 77 nt, Mycobacterium tuberculosis CDC1551
cgccggcggucagcacgcaugugcgguggccgacgcccucggcauccgcacggugcugaucccaccaauggccggcg

SEQ ID NO: 57885 - RNA, 89 nt, Mycobacterium tuberculosis CDC1551
cgcuacuugugccgccgaacagacacaaaaccacccuauuucgaccagaaucgggugcuuuugcgucugcucggccaacuaagcuagcg

SEQ ID NO: 57886 - RNA, 59 nt, Mycobacterium tuberculosis CDC1551
cgcggcgggcgugugggcgggugagaucgacccgucccugaggcuacgccccagccgcg

SEQ ID NO: 57887 - RNA, 117 nt, Mycobacterium tuberculosis CDC1551
cgcugggagugccgcuguuucaggagcagcugaugcaguuggcggucgacugcgccggcuuuuccgccgccgaggccgaccagcugcgccgcgccaugggguccaaacgcuccaccg

SEQ ID NO: 57888 - RNA, 65 nt, Mycobacterium tuberculosis CDC1551
cgcugucgccgcugauucugcagcgcgccggccagcuccggcaccugcugauggcggcgauaucg

SEQ ID NO: 57889 - RNA, 73 nt, Mycobacterium tuberculosis CDC1551
cgaucgguggugauugagggugugggccacgucggccaaggccacgucagcgccgggcccuuccauccaaucg

SEQ ID NO: 57890 - RNA, 96 nt, Mycobacterium tuberculosis CDC1551
cgaucuguccguggacgcugccgcggccgucgcggguaacccaucccuggcgaaacugcggaccgcgcaaccaaaauucguccgccgcaccuaucg

SEQ ID NO: 57891 - RNA, 80 nt, Mycobacterium tuberculosis CDC1551
cgaauuccagguugaccuugcgcccggccagcagcagcgagugaccguagcuguggccggcgucgauaacgcugguaacg

SEQ ID NO: 57892 - RNA, 85 nt, Mycobacterium tuberculosis CDC1551
cgagcggucgccgggaguaaucaccgccaugccaucggucagccgcuccaacacauggucggcggucauacccgcggccagcacg

SEQ ID NO: 57893 - RNA, 60 nt, Mycobacterium tuberculosis CDC1551
cgauugauauuaccgauggaaugucuuagacauaagacaugacaucaguaaugucucacg

SEQ ID NO: 57894 - RNA, 68 nt, Mycobacterium tuberculosis CDC1551
cgcccagcaucacaucgaggucaccacgccggaguacccgcuuggccaagccgaucgugcgcugggcg

SEQ ID NO: 57895 - RNA, 60 nt, Mycobacterium tuberculosis CDC1551
cgcacggucagcgccgacgacgagccaaagugcagccugugccaagcgcugaccgcugcg

SEQ ID NO: 57896 - RNA, 59 nt, Mycobacterium tuberculosis CDC1551
cgcacggugaguaguaauucggaugcugcugcggcauccaugagcagcucgccgccgcg

SEQ ID NO: 57897 - RNA, 128 nt, Mycobacterium tuberculosis CDC1551
cggaaugacaagcugauguaccuggugcuggugugcgcgaucguggcuggccuggcaugcacgcugaugggcgccacccaugagggcgauaugcacgauuaccggcgcucggugucggucugguuccg

SEQ ID NO: 57898 - RNA, 81 nt, Mycobacterium tuberculosis CDC1551
cggccgaucccggauacguggcaaaugugaucccgugcgaacagcgcacgcuggucuugucggcguuuccggcugaggccg

SEQ ID NO: 57899 - RNA, 88 nt, Mycobacterium tuberculosis CDC1551
cggcaucggguagccguuacaggucaccacguagcggugccggucggcgccgaugaugcggaccuggaugcgcucgaccgacgagucg

SEQ ID NO: 57900 - RNA, 125 nt, Mycobacterium tuberculosis CDC1551
cggcgccgauguuagcggcagcggccgccugggaugaucuagccuccgagcugcauugugcugcaaugucauucgggucgguuacgucgggauuggugguugggugguggcagggaucggcgucg

SEQ ID NO: 57901 - RNA, 71 nt, Mycobacterium tuberculosis CDC1551
gcacuuccucaagcaccgcgcgguccaggcucaccagcgucaggccaugggccggguucuugaccaacugc

SEQ ID NO: 57902 - RNA, 73 nt, Mycobacterium tuberculosis CDC1551
gcagcccaagucggccugcacgagguugagccgaucggccacgccucgacgcacggccucgcuguccagcugc

SEQ ID NO: 57903 - RNA, 60 nt, Mycobacterium tuberculosis CDC1551
gcaacguggcugauuugaauuccagcaccuugggcugguccagcucguacaccacggugc

SEQ ID NO: 57904 - RNA, 91 nt, Mycobacterium tuberculosis CDC1551
gaugcgaccgauggugguuugguugccuaccgcgugggcgcgcaccaccacgcguccgcgcaccacgaccgaaccggcgugcacgcgcguu

SEQ ID NO: 57905 - RNA, 73 nt, Mycobacterium tuberculosis CDC1551
gaugccgcgcugcgcgccuugauccggcugucggagaauccagacaccggaugggacgagcucaacgcggcuc

SEQ ID NO: 57906 - RNA, 59 nt, Mycobacterium tuberculosis CDC1551
gaugagucggcagguggcugucagagcuuguugagcgccugggccagugccgacuucuu

SEQ ID NO: 57907 - RNA, 67 nt, Mycobacterium tuberculosis CDC1551
gaugcccucggcggccagcagcgccgccaguucguuuuggcugcgcaccugcgccgacgacaggauc

SEQ ID NO: 57908 - RNA, 70 nt, Mycobacterium tuberculosis CDC1551
gaucuggccguccggcgucccgacaaaaagcaucccggaugcgggcagucgagcgucgccggccaccguc

SEQ ID NO: 57909 - RNA, 55 nt, Mycobacterium tuberculosis CDC1551
gaugagcgagcgacagcgugcggcgacaccggcuuacgacuuccgcccguuuauc

SEQ ID NO: 57910 - RNA, 94 nt, Mycobacterium tuberculosis CDC1551
gaugaccgggcgauucgcaaucagcuggucgagcucugcuuugagucggucaugugacucuugggucaaccaggugacuugaguauccgucauc

SEQ ID NO: 57911 - RNA, 122 nt, Mycobacterium tuberculosis CDC1551
gcaguuguccagggcccgcugcuuuacgucccgcagaucguggccccggauucgacgauguguugccucguccaggccgucgaacugcagguagaugugcacgggguggccgggacgguugc

SEQ ID NO: 57912 - RNA, 67 nt, Mycobacterium tuberculosis CDC1551
gcauguccggcagaugaucgccgaccgggaacuggaaaccuggcugguggucgacaugucggccagc

SEQ ID NO: 57913 - RNA, 58 nt, Mycobacterium tuberculosis CDC1551
gcaugcccagcaggguggcguguaggcaaaacccagccagcccgaugcugagcaaugc

SEQ ID NO: 57914 - RNA, 113 nt, Mycobacterium tuberculosis CDC1551
gcauuucguggaagaccuggugcuggagggcacgcucgaggcccgaggcaagaucgccaugcuggccaaggugcgucgcgccccggcacugaucaaggucgaauccguggugc

SEQ ID NO: 57915 - RNA, 80 nt, Mycobacterium tuberculosis CDC1551
gccaucggcgucgaccugguggccggugccgacaccucgguggccgggguacccgagcuggccggcaagacgcugguggc

SEQ ID NO: 57916 - RNA, 68 nt, Mycobacterium tuberculosis CDC1551
gcccgcacguggccgccggugaucgcgucggccagugccgccucguccaccaggccgccgcgcgcggc

SEQ ID NO: 57917 - RNA, 76 nt, Mycobacterium tuberculosis CDC1551
gcccgagccgugauccuggcaaugggcgcagcggcacgcuaucugcaggugcccggcgaacaggaauugcucgggc

SEQ ID NO: 57918 - RNA, 58 nt, Mycobacterium tuberculosis CDC1551
gcccauagugggcgcgccgagccguugacgacgaucaggcugcgcacccgcucggggu

SEQ ID NO: 57919 - RNA, 85 nt, Mycobacterium tuberculosis CDC1551
gccgcucgucgucauggucacuggcugugacugaguuguggaucuuguucaggcacagguaguuccgucgaccuuugagcagggc

SEQ ID NO: 57920 - RNA, 77 nt, Mycobacterium tuberculosis CDC1551
gccgccgggcgggugcucugcgcggucacccauggccugcugugggcggucaucgcgccgaucgccacccggcuggu

SEQ ID NO: 57921 - RNA, 59 nt, Mycobacterium tuberculosis CDC1551
gccgccucgccgagcacgccggccgccggcuuaucgguuucucggccgaacuuggcggc

SEQ ID NO: 57922 - RNA, 67 nt, Mycobacterium tuberculosis CDC1551
gccgcgcuggacaucgccaucccccgcuggucgaggacaccggccagcacaggcgcgauugcguggc

SEQ ID NO: 57923 - RNA, 81 nt, Mycobacterium tuberculosis CDC1551
gccgcaccgaaguccgggcuguaguacugauccucauacgacgggaugguguacgccgcagcgcgggccuccucggugggc

SEQ ID NO: 57924 - RNA, 105 nt, Mycobacterium tuberculosis CDC1551
gccgccagccccgacgacaacccgaugcccggcgggauguaccgcaaccaagugugguuucccuacccgggcagcaaugucgcguugugcgugggcaugugcggc

SEQ ID NO: 57925 - RNA, 68 nt, Mycobacterium tuberculosis CDC1551
gccgccacgugggcgcugagcgccugauaugccugggcaugagcgccgaacagcgcugagauggcggu

SEQ ID NO: 57926 - RNA, 77 nt, Mycobacterium tuberculosis CDC1551
gccguggccccgucguagagcuuggccagcugauugaccaccagcgcagagcuuuucacgacgcugguuuccauggu

SEQ ID NO: 57927 - RNA, 64 nt, Mycobacterium tuberculosis CDC1551
gccguaucagccucaacucggcgugccgaccgcgugguugguggcaccggucgaagcgggcggc

SEQ ID NO: 57928 - RNA, 112 nt, Mycobacterium tuberculosis CDC1551
gccggauagcagcgguacacgucggcgcuugggaagguuacagcugguuggcguucggaaccaccaaugggauguugccgagcaucaccgacagugcgccgcccacagcggc

SEQ ID NO: 57929 - RNA, 105 nt, Mycobacterium tuberculosis CDC1551
gccggcggcgaauuuguagaugucgcguuugcgcaggggcaugucagcguaugugcucgacgcgacgaauccacugcgcuugacgaggcgguacgucgcgccggc

SEQ ID NO: 57930 - RNA, 55 nt, Mycobacterium tuberculosis CDC1551
gccggcugacgacuagcgcaccagcccuugccgugguggcuguuguugcgccggc

SEQ ID NO: 57931 - RNA, 70 nt, Mycobacterium tuberculosis CDC1551
gccgguggcagagauaucguagugaucgggcucgaucaggcccggauguucugcggucucgccgccaagc

SEQ ID NO: 57932 - RNA, 91 nt, Mycobacterium tuberculosis CDC1551
gcuuuucggcgagacggcgcgccuugucgagaucgucgccgugggugacaccgacgaacgcgaccaggcccugcccguccggccggauagc

SEQ ID NO: 57933 - RNA, 56 nt, Mycobacterium tuberculosis CDC1551
gcuugccggguuugaucagcucggucuuguauaggccguugaucgucucggcuagu

SEQ ID NO: 57934 - RNA, 78 nt, Mycobacterium tuberculosis CDC1551
gcugucaucgaugucacggucgugacccgcugccaccaucucgaagucggcgguggugaccgccgcgacgucugcggc

SEQ ID NO: 57935 - RNA, 64 nt, Mycobacterium tuberculosis CDC1551
ggacggcaccaagucaccggcauccaaguagcguuuggcuuccacgccgagcuuggugcccucu

SEQ ID NO: 57936 - RNA, 77 nt, Mycobacterium tuberculosis CDC1551
ggacgacuuuuuucggccgcugucaaagccguugcgggccuugccauaugcggccgacgaccuagaccugucgaucc

SEQ ID NO: 57937 - RNA, 74 nt, Mycobacterium tuberculosis CDC1551
gcuacccgcccggggcauggccaagcuggcuuucgaugugaccccgccggccuggcuggagcccgggcaguggu

SEQ ID NO: 57938 - RNA, 69 nt, Mycobacterium tuberculosis CDC1551
gcuacucggcggacaucggaugcguccggcugaccgaacgcuguuugcacuccgacccgccgacguugc

SEQ ID NO: 57939 - RNA, 64 nt, Mycobacterium tuberculosis CDC1551
gcucagcgcuggccgcgacguccagcgguggcagcaccgggguaucaggcagccggcgcugcgc

SEQ ID NO: 57940 - RNA, 92 nt, Mycobacterium tuberculosis CDC1551
gcucaauccgaacgaaacccaggugcuugccauggcaguuaaagccaagcccggcaaaacacuaugcagcauuugggaucucacugauuggc

SEQ ID NO: 57941 - RNA, 116 nt, Mycobacterium tuberculosis CDC1551
gcucagcaucugcgccuucaugcucuucauggucuggaucaucucgggcaucaucgcggucagcuggggcaugagcguguccaggcgcugcaugagcggcagcagguuguugaugu

SEQ ID NO: 57942 - RNA, 62 nt, Mycobacterium tuberculosis CDC1551
gcugcaaacccuagaguacuuauucgucguugugucaacagguaguugcuggggugugucgc

SEQ ID NO: 57943 - RNA, 82 nt, Mycobacterium tuberculosis CDC1551
gcugcucaacuacuacccgcaucuguuggcgcucucggccucaucacccuggugggguggcgaagacaccggguaugccagc

SEQ ID NO: 57944 - RNA, 81 nt, Mycobacterium tuberculosis CDC1551
gcugcgggucgauguugucggcuucggucuuggccaccgcgaagaacuccgaaucgaagcccuugauguccuucagguagc

SEQ ID NO: 57945 - RNA, 67 nt, Mycobacterium tuberculosis CDC1551
gcuggcuuucgcgcugggccuuuugacgcugggauugaucaagggcccggauugggguugggccagc

SEQ ID NO: 57946 - RNA, 93 nt, Mycobacterium tuberculosis CDC1551
gcgucuaugaugucgccaagcgccaccccgaggugcaccagcgggccggcaccgccggaguagccggaguggcccuugcauacgacguagagc

SEQ ID NO: 57947 - RNA, 55 nt, Mycobacterium tuberculosis CDC1551
gcgguguuaucugcuccguugccgccguuaccgccgucaccgccgaugccaccgc

SEQ ID NO: 57948 - RNA, 74 nt, Mycobacterium tuberculosis CDC1551
gcggugagggcuagccgucagcgucgaaguugcgggcccgcaacgaucgcugcaccgcggccuggcccucgagc

SEQ ID NO: 57949 - RNA, 71 nt, Mycobacterium tuberculosis CDC1551
gcggugcugcacgccuucgccagcaagcugcccaaccagaagcugccguucgggguggugccaaacaccgu

SEQ ID NO: 57950 - RNA, 97 nt, Mycobacterium tuberculosis CDC1551
gcgguauuuggagccggcgaccaucgagccgagaucgagcgcgacgauggucuugucgcgcaagcucuccggcacgucgccggccacgaugcgcugc

SEQ ID NO: 57951 - RNA, 69 nt, Mycobacterium tuberculosis CDC1551
gcgggauucgucgauguggccaugugcggguuguuucauggcccacgccugcgcgacauggacgcccgc

SEQ ID NO: 57952 - RNA, 129 nt, Mycobacterium tuberculosis CDC1551
gcggucggcucaagccgaacauccgggucgggugauguuggucgauucggacggcucgauggauguuggagaugucauuggcuguggugaagagcaauugaugauccggaacggcacagccuaugccgc

SEQ ID NO: 57953 - RNA, 88 nt, Mycobacterium tuberculosis CDC1551
gcgggggcacucgacgaguccggucugcgacccgaggaucucgacguguugaucaccgccacggucaccggacuggcggugccgucgc

SEQ ID NO: 57954 - RNA, 86 nt, Mycobacterium tuberculosis CDC1551
gcgggcuucgagcagcugggcgccgacgcuuugcacaccgaagacguguugcugaagguccggcugcgccaggggcuaccgcucgc

SEQ ID NO: 57955 - RNA, 57 nt, Mycobacterium tuberculosis CDC1551
gcggccaaccggcccgccuacuauuuucagucgugacgauccaugucgguuggccgu

SEQ ID NO: 57956 - RNA, 59 nt, Mycobacterium tuberculosis CDC1551
gcggccaagggugcggacgccgaugucgcgaucauugacgcgcgcgccgacuuggcggc

SEQ ID NO: 57957 - RNA, 78 nt, Mycobacterium tuberculosis CDC1551
gcggccacggugugcuggugugcgcgccgaccggcgcuggcaagacgguggucggcgaguucgccgugcaccuggcgc

SEQ ID NO: 57958 - RNA, 79 nt, Mycobacterium tuberculosis CDC1551
gcggccauccugguuggcugcggugccacgaacgaucgccagcacacgaucaccgucgcgcaccgcauccgguagccgc

SEQ ID NO: 57959 - RNA, 56 nt, Mycobacterium tuberculosis CDC1551
gcggcgcugaugaacgguugcacgaacugacccggcagcagguucaccacguaugc

SEQ ID NO: 57960 - RNA, 62 nt, Mycobacterium tuberculosis CDC1551
gcggacugucccgagcgcaccaggaaucgaaccaggcuuccuugugucaucgggcaggucgc

SEQ ID NO: 57961 - RNA, 76 nt, Mycobacterium tuberculosis CDC1551
gcgcgaacgcgggucggcgucuccaguuucuauuucuugacauggaaaaacggcggccccgacccugccucagcgu

SEQ ID NO: 57962 - RNA, 100 nt, Mycobacterium tuberculosis CDC1551
gcgcagccgcgaaucaucgaaucgcuugccgaugccgucggucugggugacgccgugcagauccggauauuggccggugaaaaucgucgggcggcugggc

SEQ ID NO: 57963 - RNA, 76 nt, Mycobacterium tuberculosis CDC1551
gcgcaagguggcagccagcgccuccgggacacgggccuugauccgggugcccucgggcuugugcuccgccugcugu

SEQ ID NO: 57964 - RNA, 64 nt, Mycobacterium tuberculosis CDC1551
gcgcaacugcaucgccaccacuuccucggccagcgaggccagugucggcagaucagugaucagc

SEQ ID NO: 57965 - RNA, 128 nt, Mycobacterium tuberculosis CDC1551
gcgccagcgcggcgagaucacccgcgcgggggucaccggccuggugcucaauagcccguuccuggaucugcaaggcccggcaauccugcgccugccgcugaccucggcguucuucgccgcgauggcgc

SEQ ID NO: 57966 - RNA, 67 nt, Mycobacterium tuberculosis CDC1551
gcgacggccggguuuuggugcaguaccuucagauugagccgguugggccaccaguccugguuuccgc

SEQ ID NO: 57967 - RNA, 63 nt, Mycobacterium tuberculosis CDC1551
gcgacugcucggcggugaacugcgccagggcgcaaagggcgggaucauggccgaugcggucgc

SEQ ID NO: 57968 - RNA, 130 nt, Mycobacterium tuberculosis CDC1551
gcgacuugggcauaggcccacccugccagauaccuugacauauaucaaagagauguugcacacuggguucggcgccauuuugauauaagucaaacaacugggaggugucuaccaaugucccgcguucagc

SEQ ID NO: 57969 - RNA, 57 nt, Mycobacterium tuberculosis CDC1551
gcgagcuggaaugcggugugcucgaaaugccggacggcacacuggaagccagcacgc

SEQ ID NO: 57970 - RNA, 69 nt, Mycobacterium tuberculosis CDC1551
gccuggcgagcagacgcaaaagccccuaauaccugccgguuuagggggcuuuugcgucugcucgccggc

SEQ ID NO: 57971 - RNA, 63 nt, Mycobacterium tuberculosis CDC1551
gccuuucgguggcgccagcucgaugugguaggaacccagcaggcugguggugccgaucuuggc

SEQ ID NO: 57972 - RNA, 107 nt, Mycobacterium tuberculosis CDC1551
uaaccugcgcccguccgaagcgcccggcuuuuucguaggcuucgcugcgguuggggccagacagcgccgugaagcccgguggguguggccggcugacgggaugguug

SEQ ID NO: 57973 - RNA, 106 nt, Mycobacterium tuberculosis CDC1551
guuguucgucgucgucgcgaucaccaucgcuggcgcuucgcugucgaugcgcauuccgcgcugggucgaggugaccagcggugaggucccggccacauugagcuac

SEQ ID NO: 57974 - RNA, 68 nt, Mycobacterium tuberculosis CDC1551
guuucagcgccaauacaucacggcagcgggccgaacccuggcgugucacaaaguaauuggugcgcaac

SEQ ID NO: 57975 - RNA, 58 nt, Mycobacterium tuberculosis CDC1551
guuuggcgcgcccacagcccgggcggaaagcccgucgggccgucgggugugcgcagau

SEQ ID NO: 57976 - RNA, 101 nt, Mycobacterium tuberculosis CDC1551
guuucgccuguccgaugaucgcgaguuuguccagcgucugcuuggcacggaucuccuggaccaugccgaugacgcuguuggcgaugaugagcaggccgaac

SEQ ID NO: 57977 - RNA, 57 nt, Mycobacterium tuberculosis CDC1551
ucaccugcccggcaccuggagcgcgcugcgaucagccggugaagcccggguugguga

SEQ ID NO: 57978 - RNA, 83 nt, Mycobacterium tuberculosis CDC1551
ucacggccggucuccuugccuauccagcugaucgccaccgagguguccagaccgccggaauaggccaggaugacgcgcucuga

SEQ ID NO: 57979 - RNA, 60 nt, Mycobacterium tuberculosis CDC1551
uagugauucgcaucucugcaccucuucgccggugcugucaagagccaauucgaaucagua

SEQ ID NO: 57980 - RNA, 84 nt, Mycobacterium tuberculosis CDC1551
ucagcaccucuagcuugucgaccgugcggucgaauuccguuugaugcuugacggugguggccagcacgguguucaaguuguuga

SEQ ID NO: 57981 - RNA, 60 nt, Mycobacterium tuberculosis CDC1551
ucaucccgggugcgcgcaugcacaccacgguggugaucauguugaccgcgcccaggaugg

SEQ ID NO: 57982 - RNA, 82 nt, Mycobacterium tuberculosis CDC1551
ucgauauacugguggccugguccuucgccaucgaucaauggcgauagcuuaucgaggauuucuaccaacuucgugucaucga

SEQ ID NO: 57983 - RNA, 58 nt, Mycobacterium tuberculosis CDC1551
ucgccgccguagugcuccagcacccggugauccauuaccuugcgccacaacggcggga

SEQ ID NO: 57984 - RNA, 66 nt, Mycobacterium tuberculosis CDC1551
ucgaugaaugagcggucagcgucgaucgugcgacgcaggaucacacuggccugcucaaccagcaga

SEQ ID NO: 57985 - RNA, 57 nt, Mycobacterium tuberculosis CDC1551
ucgcguaugcgaagaucacgagcggcaagaugagcacgaugaugaucguguaugcga

SEQ ID NO: 57986 - RNA, 78 nt, Mycobacterium tuberculosis CDC1551
ucgcgucguggagcuccuucaucuccgcugcgcuuaauggguauccgcgcgagaagacggggcgcaagaacggggcga

SEQ ID NO: 57987 - RNA, 68 nt, Mycobacterium tuberculosis CDC1551
ucggacggcaucuccaugggucaugaggggaugcacuucucgcugguuucccgugaggugaucgccga

SEQ ID NO: 57988 - RNA, 70 nt, Mycobacterium tuberculosis CDC1551
ucgucaaguuucucagcgagcaggugcuuucccgcgcgacggagcgagugcgugcugggguacucggcga

SEQ ID NO: 57989 - RNA, 57 nt, Mycobacterium tuberculosis CDC1551
ucgucgguuuccggcaaguccccgccgcccgauacggugggcuaauggcaaccacgg

SEQ ID NO: 57990 - RNA, 85 nt, Mycobacterium tuberculosis CDC1551
ucggcauuggcgggugcugcgccuccugcggaccgugggcaugcaccacgcgcucggguugcgcgcggccuaccugccgugccga

SEQ ID NO: 57991 - RNA, 73 nt, Mycobacterium tuberculosis CDC1551
ucggaggucgugccgaucgauguguccgucgacauuccggcggucaccaucaccggcaccaggaucgacccga

SEQ ID NO: 57992 - RNA, 78 nt, Mycobacterium tuberculosis CDC1551
ucgguggcacggcgaccgcgggggcauuuucccggccgggcuugccgguggaguaccugcaggugccgucgccgucga

SEQ ID NO: 57993 - RNA, 75 nt, Mycobacterium tuberculosis CDC1551
ugacgacaacagcgagcgggagcaggccaaggaugacgguucgucggcucaucgcugcuugcauugugguaguca

SEQ ID NO: 57994 - RNA, 87 nt, Mycobacterium tuberculosis CDC1551
ugagcgccuaugaggcgguggugggugccgcgcugguggccacaccacacaccggcccggcaccggucaucgucaaacccggcgcca

SEQ ID NO: 57995 - RNA, 64 nt, Mycobacterium tuberculosis CDC1551
ucucccgcagggcacgccuagacggcggccgacgcugcccaggcguagaagguucuccggguga

SEQ ID NO: 57996 - RNA, 83 nt, Mycobacterium tuberculosis CDC1551
ucucgacgaucucgcgccguagaccuucggccaccaugggauccagacggcagagcgcggccucggcgucggcgucgucgaga

SEQ ID NO: 57997 - RNA, 59 nt, Mycobacterium tuberculosis CDC1551
ugccggcgaccgagguggcggugggccgcugagacaugacgugccucacgucgucggcg

SEQ ID NO: 57998 - RNA, 82 nt, Mycobacterium tuberculosis CDC1551
ugcgguaucgucgcugacuccguaguguuccagccgcgguaucccgguuugggccaccucggcggccagcucauauaccgca

SEQ ID NO: 57999 - RNA, 120 nt, Mycobacterium tuberculosis CDC1551
ugcgguccgggguguuggcugaacagguggcggccggaccgcugcgggaguggcuccacaagcaacgcaccggucugccgcaugucaccuggaaguacgccaccagcaucgacggccgca

SEQ ID NO: 58000 - RNA, 72 nt, Mycobacterium tuberculosis CDC1551
ugucugaggcgcugcaggagugcuuccacggccugguuggccacaugaucaauuucugagcggcucaugacg

SEQ ID NO: 58001 - RNA, 99 nt, Mycobacterium tuberculosis CDC1551
uguaugggcggggagaaccggcugaugcggugacgguggccgccgaacuggaucgccgugggcugcugcgccgcaucggcggugcucccuaccugcaca

SEQ ID NO: 58002 - RNA, 57 nt, Mycobacterium tuberculosis CDC1551
uggcgccgcuacggggcggguauaucggagauaucacgccucucggugguggggcca

SEQ ID NO: 58003 - RNA, 57 nt, Mycobacterium tuberculosis CDC1551
ugggcagcggucaaggggcccaagcaaauuccgcauggagcuccuuucgcugccgca

SEQ ID NO: 58004 - RNA, 121 nt, Mycobacterium tuberculosis CDC1551
uucgucaucuccgcacgcgcggaacccauccgccgccugcucggcggccugaaugaaacgguguucaggcuacgguagcggugcgcacggggacaaacgcgacgugggcggaggucacgga

SEQ ID NO: 58005 - RNA, 57 nt, Mycobacterium tuberculosis CDC1551
uugacccaguugauccggugugcgguucguugacaccgcaaacucguucuggguuag

SEQ ID NO: 58006 - RNA, 65 nt, Mycobacterium tuberculosis CDC1551
uuccaggccucgguggguuccgguugucguugcagccgccaaaccgcugaggaauccaccaggaa

SEQ ID NO: 58007 - RNA, 63 nt, Mycobacterium tuberculosis CDC1551
uucaugcaugugacgggccgcuggaauuggugggcaccgagaccccuggcguggcugcaugag

SEQ ID NO: 58008 - RNA, 64 nt, Mycobacterium tuberculosis CDC1551
guaccgaucguggccgguuucauggcggcgguguucgucgcguccaugguggccgggaucgugc

SEQ ID NO: 58009 - RNA, 64 nt, Mycobacterium tuberculosis CDC1551
guagcccaccggugcuguaggcgaaggugcaggcaaagaucgccagcaccaccugguugggcac

SEQ ID NO: 58010 - RNA, 62 nt, Mycobacterium tuberculosis CDC1551
guccacaacgcugcggcggcgccccacaggaaaagaacugccaacgccacucgcagugggac

SEQ ID NO: 58011 - RNA, 56 nt, Mycobacterium tuberculosis CDC1551
gucagcgucgaugaccaugucgaccccacgguguggucgauggugaugacgcuggc

SEQ ID NO: 58012 - RNA, 57 nt, Mycobacterium tuberculosis CDC1551
guccgcccuggcgauggccgaugccgaauucaccaucggugugaccacagggcuggc

SEQ ID NO: 58013 - RNA, 56 nt, Mycobacterium tuberculosis CDC1551
ggucgccggcgcuggcguagcggucuucgggcuuuuuggccaugccgcgggcgacc

SEQ ID NO: 58014 - RNA, 67 nt, Mycobacterium tuberculosis CDC1551
ggugaaguagcggcgcaccgcagaguagugaaucccggcacgaccugcgacagccguuaacgucacc

SEQ ID NO: 58015 - RNA, 82 nt, Mycobacterium tuberculosis CDC1551
ggugaguagauugcugacgaguugaugcaagcgggcaugauccccguugacccagaccggcucgucgggcagauucuucacc

SEQ ID NO: 58016 - RNA, 72 nt, Mycobacterium tuberculosis CDC1551
ggugcggucgccgcguuugggugugagaacgguugguggaaaccaaaauccgcgcccagccggagccguacc

SEQ ID NO: 58017 - RNA, 63 nt, Mycobacterium tuberculosis CDC1551
ggugccggugcgcagcgucagcucgacggcgacgccguccgggccggcuuugccgccgucacc

SEQ ID NO: 58018 - RNA, 55 nt, Mycobacterium tuberculosis CDC1551
gguggcgaaccuggguaaggccaugacaaaccuucuggucaccggguucgacacc

SEQ ID NO: 58019 - RNA, 55 nt, Mycobacterium tuberculosis CDC1551
gguggugccgguacgccaaugcccaacaaugaagauuggcggaucggcgaucacc

SEQ ID NO: 58020 - RNA, 61 nt, Mycobacterium tuberculosis CDC1551
ggugguggugaguuugagaucggcaagcugugucccaggcccgaggagacuuuccgccacc

SEQ ID NO: 58021 - RNA, 59 nt, Mycobacterium tuberculosis CDC1551
guugaugggcggcugaaggacugggcaagccucucccguuccggcccggguccagcgac

SEQ ID NO: 58022 - RNA, 119 nt, Mycobacterium tuberculosis CDC1551
gugugacggucggcgcguuggucgcgcuggcguguaugguguuggccgggugcacggucagcccgccgccggcaccccagagcacugauacgccgcgcagcacaccgcccccgccgcgc

SEQ ID NO: 58023 - RNA, 113 nt, Mycobacterium tuberculosis CDC1551
guggcccuggucgcgcugguggcagcgguagugguggugguugucgcgaccguagccuuggcccgugacgaggucgcgaugaugacgguuuccgccggcgaauugggggccgc

SEQ ID NO: 58024 - RNA, 67 nt, Mycobacterium tuberculosis CDC1551
guggcgaugccgucgucaaccaggaucacgauccuggcgcgcggaucgacgacagggcguccgccgc

SEQ ID NO: 58025 - RNA, 83 nt, Mycobacterium tuberculosis CDC1551
guggcucaggucgauacccgaggggauggcaagugucaccccgccauccuuccaccucuuuucgggugcaacgaucgggccau

SEQ ID NO: 58026 - RNA, 75 nt, Mycobacterium tuberculosis CDC1551
gucgucgaugaagucuugccauucaccguuggugaccggaacccggccgauccggaaugcgggcacgucgacgac

SEQ ID NO: 58027 - RNA, 62 nt, Mycobacterium tuberculosis CDC1551
gucggcgcggucgaaucgaucuugacggugcucgcguugcgcgaucaggugaucccgccgac

SEQ ID NO: 58028 - RNA, 129 nt, Mycobacterium tuberculosis CDC1551
gucggcucggugcagcaacgccagcagcucgguguggucgagguguccgacgaaccugguugcucugagcacccgguguuugcgggccugaucgaucaaccaauccugcugggugccuucgccggcgau

SEQ ID NO: 58029 - RNA, 79 nt, Mycobacterium tuberculosis CDC1551
gucggagaugcauuggcgcugcaguacuuucacgcagcucccuggguugcguggucggaugcaggccagcguggccaac

SEQ ID NO: 58030 - RNA, 77 nt, Mycobacterium tuberculosis CDC1551
gucgcaccucuuagcgggccauggacuggucgucgaacacguugucaccgcuuccauggcguuguuacaaccgcgac

SEQ ID NO: 58031 - RNA, 69 nt, Mycobacterium tuberculosis CDC1551
gucggugcugaauucgucggguaucuggucgaccugugugggcugcagccggacgaagcggugcucgac

SEQ ID NO: 58032 - RNA, 86 nt, Mycobacterium tuberculosis CDC1551
gugagauuccggugggcgccaaaccgaacggcgagcugcagaacaucauccugcgcgccaaggacuuuggcggcuucggguuucac

SEQ ID NO: 58033 - RNA, 66 nt, Mycobacterium tuberculosis CDC1551
gugaccaaccacccaaggaugaucggcaccgcgaagguacggaucauucuggggaugaacggucgc

SEQ ID NO: 58034 - RNA, 101 nt, Mycobacterium tuberculosis CDC1551
gugcugacgguuccgcgggccgggucucgcuuggcggcgggcagcgacugccagacccuggcgagaucgaugaaauaggucccgcggucguguccaggcac

SEQ ID NO: 58035 - RNA, 69 nt, Mycobacterium tuberculosis CDC1551
gugcccagcaccgaccagugccggccgccgagcucgauguggaugucggccugcucgguguuggugcac

SEQ ID NO: 58036 - RNA, 78 nt, Mycobacterium tuberculosis CDC1551
gggugguggugccgucgucgcgcagcccggccgcccaugagauucgcggcuccuggcgcgccacggcauccacgauuc

SEQ ID NO: 58037 - RNA, 120 nt, Mycobacterium tuberculosis CDC1551
gggugguuaccuugcgcucgcgcuugcgcagcggcugcagugcgacgacgagaaaccggcggcaauaguggccaucucuccguugcugcagcuggccaaggggcccaagcaggaccaucc

SEQ ID NO: 58038 - RNA, 85 nt, Mycobacterium tuberculosis CDC1551
ggguuugccgaucaugccccgcagcagcagcacguuggugaccucaccgaugguggccacggcgugggcguguugggucaagccc

SEQ ID NO: 58039 - RNA, 73 nt, Mycobacterium tuberculosis CDC1551
ggucauggcgcaguuggcccgggaugucggcggaccgccgcugguguuccagcugcugugguacccgacgacc

SEQ ID NO: 58040 - RNA, 62 nt, Mycobacterium tuberculosis CDC1551
gguagucaccgccgcgguuggugcgcauggugcgccgugcgaucuggacggcggcggucacc

SEQ ID NO: 58041 - RNA, 72 nt, Mycobacterium tuberculosis CDC1551
gguacgaggagcuguccgacaaaguauccgaggaacgccucgagacgauuugucggcagaucaugcuguauc

SEQ ID NO: 58042 - RNA, 71 nt, Mycobacterium tuberculosis CDC1551
gguagcgcugggcgaugaagcgcugggucaccgcgcccagcggcccggcggcuuugcucgcccaggucgcc

SEQ ID NO: 58043 - RNA, 90 nt, Mycobacterium tuberculosis CDC1551
ggggacgcguuggcgcuggccgaagccgaccggcccagcgaugacaucgacuucaaggacguucggcuuucagcgcgacgaucauccgcc

SEQ ID NO: 58044 - RNA, 62 nt, Mycobacterium tuberculosis CDC1551
ggggagacgauugccgccccgccggaaucggcggccuuggcgggcgcggcagucgccuugcc

SEQ ID NO: 58045 - RNA, 57 nt, Mycobacterium tuberculosis CDC1551
gggcggcguggccguuucaccgcguugcgaugcgcaacgcccgccaccacgccgccu

SEQ ID NO: 58046 - RNA, 87 nt, Mycobacterium tuberculosis CDC1551
gggcgucggcacugcgauggcugcgcgaggugaacgccgagcaguucgccgaccguaagccucgucagcuauccgggggccaagccc

SEQ ID NO: 58047 - RNA, 56 nt, Mycobacterium tuberculosis CDC1551
ggguaaccgcuacaaaugaaguuggucagugcuggccaacuguguaaugguugccc

SEQ ID NO: 58048 - RNA, 82 nt, Mycobacterium tuberculosis CDC1551
ggggcuacggcgaggacgaggucuggggucagcugaucaugucggagaccucgccggaccucgagcucuucaccgcgacccc

SEQ ID NO: 58049 - RNA, 70 nt, Mycobacterium tuberculosis CDC1551
ggcgguggcugcggccgaucaccgaugcgaccugguaaucgacgucgucuacgacggcccagaccucgcc

SEQ ID NO: 58050 - RNA, 120 nt, Mycobacterium tuberculosis CDC1551
ggcggucgucauacuuuccggggucgcggcggcggccaacgaggcagcggcggcccuccucggcuucccgcugcugcucgugguuggggugucgcuggccuauuuguaugucguccugcu

SEQ ID NO: 58051 - RNA, 63 nt, Mycobacterium tuberculosis CDC1551
ggcucacgauguagucgauccgaucgacgauggcuuccaccggcucgaccaacacgaugagcc

SEQ ID NO: 58052 - RNA, 95 nt, Mycobacterium tuberculosis CDC1551
ggcuugcggaguugcgggcugcccaaucagcgcugcgaccaggucucggcuggcgugcaguucggugaugugggucagcgugcagguggcaagcc

SEQ ID NO: 58053 - RNA, 64 nt, Mycobacterium tuberculosis CDC1551
ggcgagcuugcggugcaguaugucgaugaccaucgugcacagugcugaccaccgccggcucacc

SEQ ID NO: 58054 - RNA, 90 nt, Mycobacterium tuberculosis CDC1551
ggccugcgcaucgaagaugguuugcugaagaagcugggugccgaggcgguggcucagcgggucaacgaggcgcugcacaaugcgcaggcc

SEQ ID NO: 58055 - RNA, 102 nt, Mycobacterium tuberculosis CDC1551
ggccgccgcguacggggcaucgugugccgaguuggccgaucgcuaccgacaccugguggcgcugucgaucaccgacuuuggcgcugccgguccgcggucguc

SEQ ID NO: 58056 - RNA, 59 nt, Mycobacterium tuberculosis CDC1551
ggccgaaacaccgcgcgaagggcgguucaaguuuccguccccucucgugguuuuggguc

SEQ ID NO: 58057 - RNA, 69 nt, Mycobacterium tuberculosis CDC1551
ggcgcguugggaccagugcgguggcaggugaucccgauggucacugugacgccgggcuggguaugcacc

SEQ ID NO: 58058 - RNA, 105 nt, Mycobacterium tuberculosis CDC1551
ggcgaggguggugcaaacgaccuccgagguuuggcggggcgugaccuccgaaggcgccgaggcucauugguacuccgaagcccaggagguguccgacgauucgcc

SEQ ID NO: 58059 - RNA, 56 nt, Mycobacterium tuberculosis CDC1551
ggcaaggcgccggccgggcggacccccggccugcccggcaugggcagccugcugcu

SEQ ID NO: 58060 - RNA, 73 nt, Mycobacterium tuberculosis CDC1551
ggcaccccuacgucgacauuuggcaggcggucaagccacaacgaguugggcuggccgccuggccgagggugcc

SEQ ID NO: 58061 - RNA, 66 nt, Mycobacterium tuberculosis CDC1551
ggccagcgcgaugcggaacgcggugucggcggcgcuguugaugaugcggauccggauucgcuggcc

SEQ ID NO: 58062 - RNA, 119 nt, Mycobacterium tuberculosis CDC1551
ggccgacguucgcagguucugggcaauaucggcgugguugucggcuugcugcugguagcacugcuuucugagcucgagcagcucacgcccggugucgcggagcucacugaaaauaggcc

SEQ ID NO: 58063 - RNA, 79 nt, Mycobacterium tuberculosis CDC1551
ggauggguccggucagcaugaauaccgggucggcggcgcgcgcacugaugugguggaugcgggcacggggccuaagucc

SEQ ID NO: 58064 - RNA, 92 nt, Mycobacterium tuberculosis CDC1551
ggagcggccgggcucgcuggguggugggaaccgcuccagggcgggccaucccguucggcgcuuuccgccauuugaucagccugcccgccucc

SEQ ID NO: 58065 - RNA, 57 nt, Mycobacterium tuberculosis CDC1551
ggaggccgccgcgaucaccgcggcccccaaaucggccagcucggcagcggcggcucc

SEQ ID NO: 58066 - RNA, 67 nt, Mycobacterium tuberculosis CDC1551
ggacuccagcggguuugucacguagcccacuuucgucagguugcgcuuggugaacucgucagaguuc

SEQ ID NO: 58067 - RNA, 61 nt, Mycobacterium tuberculosis CDC1551
uuugcggcagaccccgauuuucgagcagaugcugaucgaugacgggauucugcuucgcaaa

SEQ ID NO: 58068 - RNA, 63 nt, Mycobacterium tuberculosis CDC1551
uuggccggcgacguuuccacgaucgcuaccacuccgccccucgucucgugggcgcgccgccaa

SEQ ID NO: 58069 - RNA, 89 nt, Pseudomonas aeruginosa PA01
uuggcuuuccagguuucccgccgggugguguccucagcgcucgccgagacgcugcugcagggccuggucccagggcggcggaaagccga

SEQ ID NO: 58070 - RNA, 66 nt, Pseudomonas aeruginosa PA01
uuggacccgcugcagguauucggugccugggacgaccggcaaacgcccugccuguacugggaacag

SEQ ID NO: 58071 - RNA, 83 nt, Pseudomonas aeruginosa PA01
uugccgccgaccuggacguacugcccggcagggguucucuccaucgccuucuugccggccauggccuccacgucggccagcga

SEQ ID NO: 58072 - RNA, 80 nt, Pseudomonas aeruginosa PA01
uugacugguaccggacuuguguuuuuacugucgaaauggucguuuuaccaagggaagcgcaaugcaagcguacgagucgg

SEQ ID NO: 58073 - RNA, 81 nt, Pseudomonas aeruginosa PA01
uugccgaacaacucgccgagcagguuccgggugcuggccuggcggccgcguccggaaaaggucucggccagguugaggcgg

SEQ ID NO: 58074 - RNA, 92 nt, Pseudomonas aeruginosa PA01
uuguaaggggucgguucgcgcaggucggcgcgggugaucuugccguuguagcgcucgcccaugccauagaucaccgucggaucggucugcaa

SEQ ID NO: 58075 - RNA, 76 nt, Pseudomonas aeruginosa PA01
uuggucaucucgacgcgcuuggccaugauugagccggcgguaccgccgaccagcaggccgacgacgauguagccga

SEQ ID NO: 58076 - RNA, 65 nt, Pseudomonas aeruginosa PA01
uuguccagccauucgcgguagaccaccaccgccagcggcaggcugccgccgauggccuuggacag

SEQ ID NO: 58077 - RNA, 56 nt, Pseudomonas aeruginosa PA01
uuguggaacacgucgauguuggcgcccaucaggcggccggcgucgaaguucggcag

SEQ ID NO: 58078 - RNA, 71 nt, Pseudomonas aeruginosa PA01
uuguggcuguugcucgguguggcauugcugggcacgcccucaacgcgcgcaaccgacggcaggguuugcaa

SEQ ID NO: 58079 - RNA, 86 nt, Pseudomonas aeruginosa PA01
uuuucccuucuuuuucaagcggcuagaucagcucaggucucuuuuagcaugcugaucagucuuugaacagguccaagaaggggaaa

SEQ ID NO: 58080 - RNA, 59 nt, Pseudomonas aeruginosa PA01
ggagcuguuucucguggcccugcgccgcgaggugcgcaagcucgacgagaacggcaucc

SEQ ID NO: 58081 - RNA, 59 nt, Pseudomonas aeruginosa PA01
ggaggaaggcggugcggaccuucggcuugagcccgucgagcauccgcgagauuuccucc

SEQ ID NO: 58082 - RNA, 97 nt, Pseudomonas aeruginosa PA01
ggagcguugcgaguugcccuacgaccuggccggugugucucgcgaccaggcgcugauccgccugcgcggcaccugccgggcagccaccaccgacucc

SEQ ID NO: 58083 - RNA, 63 nt, Pseudomonas aeruginosa PA01
ggagccguugcagugguagcacucgcgguuguucucgaucaccagcuuccaguuggcggcuuc

SEQ ID NO: 58084 - RNA, 72 nt, Pseudomonas aeruginosa PA01
ggagcagucggcaggcgagguacaccgggacuauauaaaggaaggcguagcucaggcuggcagcgacgcucc

SEQ ID NO: 58085 - RNA, 80 nt, Pseudomonas aeruginosa PA01
ggagugcguggaucgucgccguggcgaucugucucauggucggggacgcgaccgccgcuggcuggcguucggcaaacuuc

SEQ ID NO: 58086 - RNA, 89 nt, Pseudomonas aeruginosa PA01
ggagucgcagcgccagcgggcgcggagccacucccuggcgccgcugaugagcggcaacggcaagcgcuccggcggcuggaagcgacgcc

SEQ ID NO: 58087 - RNA, 57 nt, Pseudomonas aeruginosa PA01
ggagguccgucaugccgcucgagcaacauccgcuuucccgggaguuuccggauuuuc

SEQ ID NO: 58088 - RNA, 129 nt, Pseudomonas aeruginosa PA01
ggagugggcgcaagcgcucgaagaggcuggagugggugagauuuuucuaaauucuauugaucgagauggagugcagaaaggcuucgacaacgcucuaguggaaaauaucgcuucuaacguccaugugcc

SEQ ID NO: 58089 - RNA, 68 nt, Pseudomonas aeruginosa PA01
ggauggucucuuccaucaccgagcgcaggaucucguccuugcucuugaagugauggaagaugcugccc

SEQ ID NO: 58090 - RNA, 110 nt, Pseudomonas aeruginosa PA01
ggaugucggccagggccaucugcgcggcgacccgcucgccgucguugcucgccgcgacgccggcgaggaaaucgccggagcgcgcggggcuggccuuggccaucacgucc

SEQ ID NO: 58091 - RNA, 63 nt, Pseudomonas aeruginosa PA01
ggaugcgccgcaggucggcgccguagacccggaggauuccggugcggacgauaugcgugcccc

SEQ ID NO: 58092 - RNA, 62 nt, Pseudomonas aeruginosa PA01
ggaugcggaugcgcuugucgcgggcguucuugugccgcgacuugaacagccagccguagacc

SEQ ID NO: 58093 - RNA, 60 nt, Pseudomonas aeruginosa PA01
ggaugcgguggccccaccagagcuggcggcugaugcaccaguccuggaugucgcgcaucc

SEQ ID NO: 58094 - RNA, 105 nt, Pseudomonas aeruginosa PA01
ggaugcuggcgauauccuucaaccgcucggccugggccgcgccggcggccaggagcagcgcggcgagggccagcaggugcuugaacuuggucaucgcgagcgucc

SEQ ID NO: 58095 - RNA, 76 nt, Pseudomonas aeruginosa PA01
ggauuucucgcuggcgcggcugcucagggcguaggccagggcgaggaacacgcagccgagcagcagcgaggaaccc

SEQ ID NO: 58096 - RNA, 93 nt, Pseudomonas aeruginosa PA01
ggcaacgccagcaccacgaugcuggucagcuuggcguuggugacgaacaucagcagcaccccgccgaccagcaucagggcauugcgcagggcc

SEQ ID NO: 58097 - RNA, 75 nt, Pseudomonas aeruginosa PA01
ggauacugcucaccacgguguucgucugccagcccaacuauggcgcgacccgccugcgccuggugcagcggaucc

SEQ ID NO: 58098 - RNA, 60 nt, Pseudomonas aeruginosa PA01
ggaucggcccucugcggcaggcgggugccgcucgccgccagcaggcggccgaggaacucc

SEQ ID NO: 58099 - RNA, 69 nt, Pseudomonas aeruginosa PA01
ggaucggugguguagacgccgucgacgucgguguagaucuggcauucgucggccuucaacgccgccgcc

SEQ ID NO: 58100 - RNA, 66 nt, Pseudomonas aeruginosa PA01
ggaucguagccuuggagaaaccguccucccaggagcagggccagugguauuuccagcgcuacaucc

SEQ ID NO: 58101 - RNA, 67 nt, Pseudomonas aeruginosa PA01
ggaugagcgcugcguggcgcccaacggccgccggaucaggguccgggccaggcacuacgugcucucc

SEQ ID NO: 58102 - RNA, 85 nt, Pseudomonas aeruginosa PA01
ggccgagauguucccgccggaggugcgcgcccucggcgucggaguguccuacgcggugggcaacgcgaucuucggcggcucggcc

SEQ ID NO: 58103 - RNA, 59 nt, Pseudomonas aeruginosa PA01
ggccgagcacgucggcuucgagcuggccuaccuggucuccgccggagccugugucggcc

SEQ ID NO: 58104 - RNA, 91 nt, Pseudomonas aeruginosa PA01
ggccgagcugauccgugccgccgccgaggcuucgcugcgcgacuacauuuccgcccagcgccgccugggccgcgacauccggcguucggcc

SEQ ID NO: 58105 - RNA, 88 nt, Pseudomonas aeruginosa PA01
ggccgaggcggucgccacugccggcaacucggcgaucccgcuggucaaggcgcugggccgccagguggcggcuggcgacgccgaggcc

SEQ ID NO: 58106 - RNA, 105 nt, Pseudomonas aeruginosa PA01
ggccgagggcggcgagcaggcgccggcgcugcgggcucagcggcuggccguccagcggcgcgacaccgagcagugccagcggucccucuuccgccgacagcggcc

SEQ ID NO: 58107 - RNA, 101 nt, Pseudomonas aeruginosa PA01
ggccgaggucaacuggguggcccaggagcagccggagaucgcugcgaagaccgacaagguguugcugcuuuccggcuuucucagccaccgccugaccggcc

SEQ ID NO: 58108 - RNA, 64 nt, Pseudomonas aeruginosa PA01
ggcccugcgcgagcgccugggucggcaggcgccccuggccgccgaccuggcgccgcgccuggcc

SEQ ID NO: 58109 - RNA, 127 nt, Pseudomonas aeruginosa PA01
ggccagcgcggugagcagcaucgucaggccgaccagggcgggcaccaguugcuggccgaaacgaccgagcagcaggccgcccagggucgcggugaggaugaaggccagcgaaccgaccgcgcguacc

SEQ ID NO: 58110 - RNA, 88 nt, Pseudomonas aeruginosa PA01
ggccagcucccccuggcggagcgccaggcggcguugcagcggcuggccgccgcagcgcccugacgccugcucaggcggcgagcugguc

SEQ ID NO: 58111 - RNA, 66 nt, Pseudomonas aeruginosa PA01
ggccagcgccgccgccagaucgaucaucgccaucgcggugccggggcaggcgcggucgccgaggcc

SEQ ID NO: 58112 - RNA, 67 nt, Pseudomonas aeruginosa PA01
ggccacgaccgucccuggguguucgcccgcagcguggcggcgcgcagcgcccuggaaggcucgggcu

SEQ ID NO: 58113 - RNA, 78 nt, Pseudomonas aeruginosa PA01
ggccacguugcugcuuucgaagcgcucgcgcccgccgaccccgcgcaggcugucgaggacgaacgcggcgaacaggcc

SEQ ID NO: 58114 - RNA, 56 nt, Pseudomonas aeruginosa PA01
ggcccagaccgaauugcggggccggcguccaguagcgcgccagcagcgguucggcc

SEQ ID NO: 58115 - RNA, 58 nt, Pseudomonas aeruginosa PA01
ggcccagcuggaaggccagcucgcggcccugguacggcugcgcgccgaccagcggguc

SEQ ID NO: 58116 - RNA, 65 nt, Pseudomonas aeruginosa PA01
ggcccaguucgccgccgccguugcgacuguccgggaacagccaguggcgcggggcgagcugguuc

SEQ ID NO: 58117 - RNA, 79 nt, Pseudomonas aeruginosa PA01
ggccaggucgucgcgcaggaugcgcuccagcucgccgcccaggucgcgggaaaucaggcgcuccucgaugauguggacc

SEQ ID NO: 58118 - RNA, 65 nt, Pseudomonas aeruginosa PA01
ggccagucgcugcgagccagguucaggcccuugaacagugccuugccggcgccgcagagcuggcc

SEQ ID NO: 58119 - RNA, 55 nt, Pseudomonas aeruginosa PA01
ggccaugaggcggcggcgcugugccugcuggcggcggccgcccuccucaugugcc

SEQ ID NO: 58120 - RNA, 76 nt, Pseudomonas aeruginosa PA01
ggcaccguccgccgcguuccacuccagcgccugcauuucgccacgcggcuggcagcgcgcggccucggcgguggcc

SEQ ID NO: 58121 - RNA, 80 nt, Pseudomonas aeruginosa PA01
ggcaagucguucagauacccauguuggccaggcucugcacgauggagcggagcgugccggcgagggucggguggcugacc

SEQ ID NO: 58122 - RNA, 77 nt, Pseudomonas aeruginosa PA01
ggcaauggccggccguagggaaucgaacgccagugcggcggcaccguaucgacgcucugcagguucgaccagaugcc

SEQ ID NO: 58123 - RNA, 76 nt, Pseudomonas aeruginosa PA01
ggcacgcagcgcaugcucguagccggcgcugucgaaagcgcggucggcggcgagcauggcguugaucucgugggcc

SEQ ID NO: 58124 - RNA, 82 nt, Pseudomonas aeruginosa PA01
ggcacggacgccggcuacgccuacgugcccggcagcgacaaaccggcggugcuggaaacccucggcguggucggcgccggcc

SEQ ID NO: 58125 - RNA, 73 nt, Pseudomonas aeruginosa PA01
ggcagcgccggcgacgugcugcgccuucuggagguccuucgccagggcggcgcgccguugcugacgccuggcc

SEQ ID NO: 58126 - RNA, 92 nt, Pseudomonas aeruginosa PA01
ggcagcgcgacggugccacgccgagccuggccgcggccaggcgauagccauccggagccggcuugccguggaccacgucgucgcggcugacc

SEQ ID NO: 58127 - RNA, 58 nt, Pseudomonas aeruginosa PA01
ggcaggccggguugauggccaggaugcgcgccgccaucaccucgaccuuggccuugcc

SEQ ID NO: 58128 - RNA, 69 nt, Pseudomonas aeruginosa PA01
ggcaggcguuucuucagcagcccgaggcugccgaugauuaccgucagcagguuguugaagucgugggcc

SEQ ID NO: 58129 - RNA, 57 nt, Pseudomonas aeruginosa PA01
ggcauccgccugcgacaguucccauccaggccacaguugaugggcgaggcggaagcc

SEQ ID NO: 58130 - RNA, 72 nt, Pseudomonas aeruginosa PA01
ggcaucgacguggaucaccgugccacgcuggguggucagcgacaccccgcggaugagcccgcgaucgauguc

SEQ ID NO: 58131 - RNA, 89 nt, Pseudomonas aeruginosa PA01
ggcaguccgucgaccggauagcccugcuggcgcagggcacgaaggauguucagcgccgccgccgggguguccaggccgacgccauugcc

SEQ ID NO: 58132 - RNA, 67 nt, Pseudomonas aeruginosa PA01
ggcaguuggauaccgcgacgaacuugccgucggcauccugcaggccgaucucgcggauccagaagcc

SEQ ID NO: 58133 - RNA, 94 nt, Pseudomonas aeruginosa PA01
ggccaaggccagccccgcgcgcuccggcgauuuccucgccggcgucgcggcgagcaacgacggcgagcgggucgccgcgcagauggcccuggcc

SEQ ID NO: 58134 - RNA, 90 nt, Pseudomonas aeruginosa PA01
ggcgaggucgccuuccccggcgggcggcgcgacccggaagaugccgaccuggugcgcaccgcccugcgcgaggcggaggaggagaucgcc

SEQ ID NO: 58135 - RNA, 56 nt, Pseudomonas aeruginosa PA01
ggcgaucggcauggaugggguggagauccacggcgcccacggcuaccugaucgacc

SEQ ID NO: 58136 - RNA, 55 nt, Pseudomonas aeruginosa PA01
ggcgcacgucggcgaucuccggagccaccgugagccccgagccgccgacgugguu

SEQ ID NO: 58137 - RNA, 60 nt, Pseudomonas aeruginosa PA01
ggcgccggcagguccaggcgcuccagcggcacacgcgugccggcgccggccugcggcgcc

SEQ ID NO: 58138 - RNA, 74 nt, Pseudomonas aeruginosa PA01
ggcgccggccaggccccggucgauggccuugagcagcagcguacuggcguuuuccgcggccuggccccaggccc

SEQ ID NO: 58139 - RNA, 56 nt, Pseudomonas aeruginosa PA01
ggcgccggccgucguccucgaagucgcaggcgagcacuucgcgguugucggcgacc

SEQ ID NO: 58140 - RNA, 70 nt, Pseudomonas aeruginosa PA01
ggcgccgggcuugagcuggauauacgccaccggcagcucgccggccuuggcguccggcuugcccaccgcc

SEQ ID NO: 58141 - RNA, 87 nt, Pseudomonas aeruginosa PA01
ggcgccgaaggggacaccccgcugcuguuuuccgaccgugcccggcgcggggcggagagccagccggaacugacccucgcgcgcgcc

SEQ ID NO: 58142 - RNA, 59 nt, Pseudomonas aeruginosa PA01
ggcgccacggugcuggagcacgcccgcgaugcggcccggcgcuuccugcaccuggcgcc

SEQ ID NO: 58143 - RNA, 67 nt, Pseudomonas aeruginosa PA01
ggcgccgucggccauuaccaggugacccugaaaguaggguuccguaucgccaauagcugauggcacc

SEQ ID NO: 58144 - RNA, 59 nt, Pseudomonas aeruginosa PA01
ggcgccgcgaugcaacucgacgcccagccaaaggcgcugggggaagcguucgcggagcc

SEQ ID NO: 58145 - RNA, 68 nt, Pseudomonas aeruginosa PA01
ggcgccuuggucaucgggguggaucgggcuagaaugccgcucccuuucacuuucgugaccguccagcc

SEQ ID NO: 58146 - RNA, 71 nt, Pseudomonas aeruginosa PA01
ggcgcgacagagugccgcaggugaaaacguuugcaacccuugcgggcuuucccccgccgcgcucuuccgcc

SEQ ID NO: 58147 - RNA, 56 nt, Pseudomonas aeruginosa PA01
ggcgcgaguugcugcgcgucuaccaucgccuggaagcgcgcggcgagauucgcggc

SEQ ID NO: 58148 - RNA, 70 nt, Pseudomonas aeruginosa PA01
ggcgcgcgcuggucgguccgggauuuccgcgagcuacggaucguccgcgaagacgaccggcuguacugcc

SEQ ID NO: 58149 - RNA, 60 nt, Pseudomonas aeruginosa PA01
ggcgcgcaggcgcagaacaccucgaccuucgcucucgacgaucucuccacgcugcgcgcc

SEQ ID NO: 58150 - RNA, 55 nt, Pseudomonas aeruginosa PA01
ggcgcgcaggcugaagaaggcgcgcccgucgggcuguuccuucagcgaugcggcc

SEQ ID NO: 58151 - RNA, 72 nt, Pseudomonas aeruginosa PA01
ggcgcucaggcgcguggcccagcaggagggggcuacugccuucgcccuguugcuggcuucguuccaggcgcu

SEQ ID NO: 58152 - RNA, 95 nt, Pseudomonas aeruginosa PA01
ggcgcucgcgcggcaggccgggcuccagcucggcgaggucggccaggcgcucggcgccgagcaauucggcgagcagggcggcgccggcgguaucc

SEQ ID NO: 58153 - RNA, 89 nt, Pseudomonas aeruginosa PA01
ggcgcugcagggugcgcggccgguagccgaaggugaacaucugcuggcgggucagcacuacgcgcaccgaccgccgcaguugcagcgcc

SEQ ID NO: 58154 - RNA, 100 nt, Pseudomonas aeruginosa PA01
ggcgcggcaggaagcucagggucuguucguugaucuggguggcggccuggaacaucgccaccacgagaccgaccagcaggcucggaaccaccagcacgcc

SEQ ID NO: 58155 - RNA, 55 nt, Pseudomonas aeruginosa PA01
ggcgcggcucguggaucagcgcgcgagccagcgcgacgcgcugcuucugcccgcc

SEQ ID NO: 58156 - RNA, 67 nt, Pseudomonas aeruginosa PA01
ggcggagcggcuaggccugcaacugccgcagcggcgacugcgggaucgccagccgcaacuguucgcc

SEQ ID NO: 58157 - RNA, 60 nt, Pseudomonas aeruginosa PA01
ggcgcgggucgagcguggccaggucgccgcgauagccaccgggcuugcgcaggcccggcc

SEQ ID NO: 58158 - RNA, 69 nt, Pseudomonas aeruginosa PA01
ggcgcggucaccggccagccggucucggucugccaccaauggucguggaccggccgcccggugugcucc

SEQ ID NO: 58159 - RNA, 58 nt, Pseudomonas aeruginosa PA01
ggcgcugcuguuccaguacgcgguggcgauccagcaucugcgccuggacaaguacgcc

SEQ ID NO: 58160 - RNA, 129 nt, Pseudomonas aeruginosa PA01
ggcgcuggaaaccgaacugcgccgcgcccucgagcgcgacgaguugcagcucuacuaccaacccaagcugagccuggagagcggcuugcuggucggcgccgaggcacuggugcgcugguaccauccgcu

SEQ ID NO: 58161 - RNA, 56 nt, Pseudomonas aeruginosa PA01
ggcgcugggcuugaccccggcguagucguacucguugcugugcaccgcccagagcc

SEQ ID NO: 58162 - RNA, 74 nt, Pseudomonas aeruginosa PA01
ggcgcuucaagcagcgccugaaggaagucgacuaugaccuggugaucgacgcccaggggcugcugaagagugcc

SEQ ID NO: 58163 - RNA, 78 nt, Pseudomonas aeruginosa PA01
ggcggaucuucgccaguugcgcgagggugcgcgcgggaucgcgaucgaccagggcgcggccggcgaagaauuucugcc

SEQ ID NO: 58164 - RNA, 58 nt, Pseudomonas aeruginosa PA01
ggcggcaagcucggccugcgcaucgacgagaaccagcgcgugcagcucgcccucagcc

SEQ ID NO: 58165 - RNA, 77 nt, Pseudomonas aeruginosa PA01
ggcggccgugcagcgcuggugcgccgaggacuccgcuucgcaggggcugguccuggauaccggcaaugcgcgcuacc

SEQ ID NO: 58166 - RNA, 83 nt, Pseudomonas aeruginosa PA01
ggcggccuaucucgacauggaucggcuggucgcgcuggcccuggagcagggcugcgaggcgauccauccgggcuacgguuucc

SEQ ID NO: 58167 - RNA, 66 nt, Pseudomonas aeruginosa PA01
ggcggcgccguucggcaggcugcagaccuucguggugguugccggccugaucggcgcggcgcuguu

SEQ ID NO: 58168 - RNA, 130 nt, Pseudomonas aeruginosa PA01
ggcggcgccuggccgacuacaucgaaagccaccuggagcagccgcuggaacuggggucgcuggcggagcuggcggcgcucuccgaguaccacuucgcgcgcauguuccgcguauccuucggccugccgcc

SEQ ID NO: 58169 - RNA, 60 nt, Pseudomonas aeruginosa PA01
ggcggcgcuccucgaaggggaacggcagauugcgguagcccuccuccacguggcgccgcu

SEQ ID NO: 58170 - RNA, 80 nt, Pseudomonas aeruginosa PA01
ggcggcggcgacgccacuccucguuccaggcugaagucauuccgcucaguccugcagcagggugccgcgguugagccgcc

SEQ ID NO: 58171 - RNA, 90 nt, Pseudomonas aeruginosa PA01
ggcggcggcggcgagguccuggcggccguagccgagguuggugcaccagaggccggacaugccguccagguagcgcuugccgucguuguc

SEQ ID NO: 58172 - RNA, 76 nt, Pseudomonas aeruginosa PA01
ggcggcggugcgcggggucgcggugaagagccuggacuaccuguucguggcccuggugacccuggucaccgucgcc

SEQ ID NO: 58173 - RNA, 63 nt, Pseudomonas aeruginosa PA01
ggccgcagcgggcaggccgccuggcgcccgaccccauccggcuuccggcggccucccgcggcc

SEQ ID NO: 58174 - RNA, 60 nt, Pseudomonas aeruginosa PA01
ggccgccgcguggcgucggagucucgccgaacgcaggacggccugcgcccgcgaucggcc

SEQ ID NO: 58175 - RNA, 56 nt, Pseudomonas aeruginosa PA01
ggccgccgagccaggccucgcguaucacgcugaucgguagcggcucggcgaaggcc

SEQ ID NO: 58176 - RNA, 71 nt, Pseudomonas aeruginosa PA01
ggccgccgcccgccuggguagcuacguggcggcggcgaaagcccugcacguaacccagccggcggucggcc

SEQ ID NO: 58177 - RNA, 79 nt, Pseudomonas aeruginosa PA01
ggccgccugaguuucccgagcgcaugaaaaagcccggcauccgccgggcuuucucguuaccgccggcucauugcuggcc

SEQ ID NO: 58178 - RNA, 60 nt, Pseudomonas aeruginosa PA01
ggccgcgaagugacguaggccagugccaucugcgccgguuccaguccauguucgcgggcc

SEQ ID NO: 58179 - RNA, 58 nt, Pseudomonas aeruginosa PA01
ggccggagcggcccucgauccgcugguggaguucuaccggccgaucccgccguuggcc

SEQ ID NO: 58180 - RNA, 78 nt, Pseudomonas aeruginosa PA01
ggccggcaggaucaggauguacaccucgggauggccccaggcccagaagagguugauguacaucauggcguugccgcc

SEQ ID NO: 58181 - RNA, 70 nt, Pseudomonas aeruginosa PA01
ggccggccuggcgccggcuucggcauacaucugccucgaacacgccgagcaccuggcgcccggccuggcc

SEQ ID NO: 58182 - RNA, 56 nt, Pseudomonas aeruginosa PA01
ggccggcgacgguggccgaggucaaccaggaguggcuggccgacucguagccggcc

SEQ ID NO: 58183 - RNA, 56 nt, Pseudomonas aeruginosa PA01
ggccggcggcgugccagaggcagaguucgucgaagaagaaagcgguacgucggguc

SEQ ID NO: 58184 - RNA, 61 nt, Pseudomonas aeruginosa PA01
ggccgggauuuccugcaacugcgccaggcccaguugggcacgcaauugcucgggacuggcc

SEQ ID NO: 58185 - RNA, 55 nt, Pseudomonas aeruginosa PA01
ggccgggacgaagccggggaaaucgaaggcauuggccacccccucuuccuuggcc

SEQ ID NO: 58186 - RNA, 83 nt, Pseudomonas aeruginosa PA01
ggccgguggugucauuggcagccaucgcgcgaccgcuggcggcgaacgggaaggugccgacguugacuucgacgcccucggcc

SEQ ID NO: 58187 - RNA, 81 nt, Pseudomonas aeruginosa PA01
ggccgguucgaagcgcgccagcagguggcggauggcggccugcacgccggccaucaccgccagcuggugcgccuugagguc

SEQ ID NO: 58188 - RNA, 76 nt, Pseudomonas aeruginosa PA01
ggccguccuggcgguuguccaggcugcucgccucgacccgcaguucgcccucggcgagcagcuugccgccacgguu

SEQ ID NO: 58189 - RNA, 58 nt, Pseudomonas aeruginosa PA01
ggccgucgcggcgagcgaucagcacggccugguagaaguccgccucgccgcugcgguc

SEQ ID NO: 58190 - RNA, 93 nt, Pseudomonas aeruginosa PA01
ggccgugcggcaagggcgucggccaggcgcaugccgccgcgcacgucgcugcgcacggcgcucagggucugggcgaugugcuugcgcucggcc

SEQ ID NO: 58191 - RNA, 70 nt, Pseudomonas aeruginosa PA01
ggcgaagaucggcgccucggcagccggggcggcaggcuuggccggggcggccggggcguucuucuucgcu

SEQ ID NO: 58192 - RNA, 69 nt, Pseudomonas aeruginosa PA01
ggcgacaggcgcggguacuggugcagcccgcacugcggacacugcaucacccgcucgugguccugcgcc

SEQ ID NO: 58193 - RNA, 63 nt, Pseudomonas aeruginosa PA01
ggcgacgccggcggcacccaguucgaccgcuucgacaucgcuggcgacccguccggccuugcc

SEQ ID NO: 58194 - RNA, 94 nt, Pseudomonas aeruginosa PA01
ggcgacuggcgcuccaggguggccagcgcgguacucgacggcagcagggaaaugcguucguugcuggugcugcgcagcagcgaggccggcagcc

SEQ ID NO: 58195 - RNA, 57 nt, Pseudomonas aeruginosa PA01
ggcgagcagcggcaggcugucgcgcagcagggcgccggcggccuugcgcagcuugcc

SEQ ID NO: 58196 - RNA, 57 nt, Pseudomonas aeruginosa PA01
ggcgagcuuggcggcgauggcguagggcacgccgcugcccauggucgccagcuugcc

SEQ ID NO: 58197 - RNA, 57 nt, Pseudomonas aeruginosa PA01
ggcgaggaagucgcagugcucgcgggucagccggcgcaugcccuugccuuccgcgcc

SEQ ID NO: 58198 - RNA, 68 nt, Pseudomonas aeruginosa PA01
ggcgaggaggaucgccgcgauccauaccgaggcgacgaaggggaucagcccggcgaucccgccuggcc

SEQ ID NO: 58199 - RNA, 58 nt, Pseudomonas aeruginosa PA01
ggcgagcuggaugccgcgcagugccuguacgggcuggucuacggcguccagcucggcc

SEQ ID NO: 58200 - RNA, 61 nt, Pseudomonas aeruginosa PA01
ggcgacccggacuucgccggcgccaagauccaccuggacguccgccgccgaauccuucgcc

SEQ ID NO: 58201 - RNA, 70 nt, Pseudomonas aeruginosa PA01
ggccucgcgccacagcgcguggagguucuccaggcgcacgucggggagcaccagguucuguucgugggcc

SEQ ID NO: 58202 - RNA, 56 nt, Pseudomonas aeruginosa PA01
ggccugggcggccaggacuacagcaucaacgcgcaguucaacggcagcccggcguc

SEQ ID NO: 58203 - RNA, 66 nt, Pseudomonas aeruginosa PA01
ggccugcccgggagcggugcgcucgaggucgacgagcagcacguguucgugagcgagaacaagguc

SEQ ID NO: 58204 - RNA, 72 nt, Pseudomonas aeruginosa PA01
ggccuuccuggccugcagcuuggccggguugaucaggaaacgcgccagggccggcagcagccagagggcgcc

SEQ ID NO: 58205 - RNA, 69 nt, Pseudomonas aeruginosa PA01
ggccuucgaggccgcaggccuggagugccugccggucccggucgacgaacagggccugcggcccgagcc

SEQ ID NO: 58206 - RNA, 120 nt, Pseudomonas aeruginosa PA01
ggccuugccgaucagcgacgagcugggcuucguccucggcgcgcuggugaucggcuggcaccucuggcgccagcgugcgcgcgaggcgguggcgugaucgcgcugugucugggcauggcc

SEQ ID NO: 58207 - RNA, 72 nt, Pseudomonas aeruginosa PA01
ggccuuguugaucaugccgcgguucucaggaguguccugaacuucgacgguaugauugaugcgacgcaggcc

SEQ ID NO: 58208 - RNA, 81 nt, Pseudomonas aeruginosa PA01
ggcuuuccaggccgccagccguucggccuugagcgccccgcagaccaguucguggccaagggcgauggcggccugcuggcc

SEQ ID NO: 58209 - RNA, 68 nt, Pseudomonas aeruginosa PA01
ggcuuucccgucgaugcggagcggauagccgcgauacgguuauccgcuccacucaacggggcgaggcc

SEQ ID NO: 58210 - RNA, 55 nt, Pseudomonas aeruginosa PA01
ggcuggaggcgccggguugccuggaguaccaggugcgcagggacgcccucgagcc

SEQ ID NO: 58211 - RNA, 57 nt, Pseudomonas aeruginosa PA01
ggcuuccauggugacgccggucugcgcgcugaacaggccgaacucgcccugggcguc

SEQ ID NO: 58212 - RNA, 55 nt, Pseudomonas aeruginosa PA01
ggcuucggcuccccagccggacgacgacgcgcgucugggacgggugcugaagacc

SEQ ID NO: 58213 - RNA, 63 nt, Pseudomonas aeruginosa PA01
ggcuucgucgagggaggcggucggcucgucgagcagcaggaucggccacucgaccaugaagcc

SEQ ID NO: 58214 - RNA, 87 nt, Pseudomonas aeruginosa PA01
ggcuuuuccgagagcgcccugcugagcagccuggacgccgccagcgggccggcccgggugauccuccagcauguccucgcggaugcc

SEQ ID NO: 58215 - RNA, 72 nt, Pseudomonas aeruginosa PA01
gggaaguagcgcccggcgcggcagcggucgcuccaggcggccagcaggaugcgcccggcgacgccgcugccc

SEQ ID NO: 58216 - RNA, 72 nt, Pseudomonas aeruginosa PA01
ggcuguccgucgacggcccgcuggcggcggcgauccccggccugccggcggcgcuggucgaauugagcagcc

SEQ ID NO: 58217 - RNA, 85 nt, Pseudomonas aeruginosa PA01
gggcaaccugaacagccagugcgcggugcugaccuggcuaccgaacaacgccacggaagcgauccgugccugguccagauagccc

SEQ ID NO: 58218 - RNA, 55 nt, Pseudomonas aeruginosa PA01
gggcagcuucagcaagcgcucggcgggguagagccgggcgcuggcauaggcgccc

SEQ ID NO: 58219 - RNA, 86 nt, Pseudomonas aeruginosa PA01
gggccgcugagguucaggccggcugccgccacucgcguagcaguucgaugaaggcgcgcagcuuggccgguacguggcggcgguuc

SEQ ID NO: 58220 - RNA, 65 nt, Pseudomonas aeruginosa PA01
gggccggagccgguucgcaccuauccgguggauaucgcgauccgugccuaugaucguuccggccu

SEQ ID NO: 58221 - RNA, 62 nt, Pseudomonas aeruginosa PA01
gggccuggccgacaugcccggcgccgaucccgaggugcgcgcggcgaucgaggccgaggccc

SEQ ID NO: 58222 - RNA, 60 nt, Pseudomonas aeruginosa PA01
gggccgcccggcgggaucuugcccugggcgacggucagcacuugccgcgcguggcggcuc

SEQ ID NO: 58223 - RNA, 82 nt, Pseudomonas aeruginosa PA01
gggcccggagcacgcgguggcggcuguggauauccucgccgaggacggcgagcgcagccuugccgcgcuguucgccgggcuc

SEQ ID NO: 58224 - RNA, 65 nt, Pseudomonas aeruginosa PA01
gggcaggugcgcccagcgcgcggucaugaagucgauggucuccaccgcgcgcagggcgacgaccc

SEQ ID NO: 58225 - RNA, 69 nt, Pseudomonas aeruginosa PA01
gggccagcggguugaucgagaaauaggcgcugcgguaccagcgcaccagggucgggccgcgcucggucc

SEQ ID NO: 58226 - RNA, 57 nt, Pseudomonas aeruginosa PA01
ggcucgcgagcgccagggcaacgaugcauuccucgcugccuuccugcucggcgagcc

SEQ ID NO: 58227 - RNA, 60 nt, Pseudomonas aeruginosa PA01
ggcucgcgcgggcugaccccgcuggacgguaucaccgcccugggcaugcuggugcuggcc

SEQ ID NO: 58228 - RNA, 56 nt, Pseudomonas aeruginosa PA01
ggcucgcucaugucgucgccuuccaccaguacgguguagagcgcggugaucgagcc

SEQ ID NO: 58229 - RNA, 74 nt, Pseudomonas aeruginosa PA01
ggcucuaccuggagcagcgcaaccugcagcgaguggcggacguggcggcgcuggagagugccucccagggagcc

SEQ ID NO: 58230 - RNA, 59 nt, Pseudomonas aeruginosa PA01
ggcuccgcgaacgcuucccccagcgccuuuggcugggcgucgaguugcaucgcggcgcc

SEQ ID NO: 58231 - RNA, 75 nt, Pseudomonas aeruginosa PA01
ggcugcaaccgcagcgcccgcgacuacccgcuggagcaaggcuacgugcggcuguucgaggcgcagguggcggcc

SEQ ID NO: 58232 - RNA, 82 nt, Pseudomonas aeruginosa PA01
ggcugcuccgcgccacgcccugguggcuauugcuggcgaucgucgcggcgaucgccuggcacgccacccggcgccugcugcc

SEQ ID NO: 58233 - RNA, 88 nt, Pseudomonas aeruginosa PA01
ggcuaugacguggucgaccucggcgugauggugccggcggagaagauccugcagaccgccaucgccgagaaaugcgacaucaucggcc

SEQ ID NO: 58234 - RNA, 76 nt, Pseudomonas aeruginosa PA01
ggcugccagcgccagcgaacaacugggcgacgucggaggcgucgaacagguagcgcugguugcagaacuggcaguc

SEQ ID NO: 58235 - RNA, 63 nt, Pseudomonas aeruginosa PA01
ggcugccgcccuugcggccgcgacugagaccgucgaggcggucgcgcagggcagccggcaguu

SEQ ID NO: 58236 - RNA, 60 nt, Pseudomonas aeruginosa PA01
ggcugcgaauuccccuaccggcgcaucgacgcgcuggagacccuggauuucgccgacgcc

SEQ ID NO: 58237 - RNA, 61 nt, Pseudomonas aeruginosa PA01
ggcuguaccucggcgcuggugcgauaucggcugcuggccaggggcgccagcgccgacagcc

SEQ ID NO: 58238 - RNA, 78 nt, Pseudomonas aeruginosa PA01
ggcgguguccgggcaguucggccucggcugccuggccagccuggcggucggcuggcuggcgcugcccggcgugcugcc

SEQ ID NO: 58239 - RNA, 61 nt, Pseudomonas aeruginosa PA01
ggcgguuguccaggcugcucgccucgacccgcaguucgcccucggcgagcagcuugccgcc

SEQ ID NO: 58240 - RNA, 97 nt, Pseudomonas aeruginosa PA01
ggcguccguggccagcggcgcggacaguugggaagacugguggcaacgcgccgcgcagaucccccggcuggccccgcugaaggcgcagcgcgacgcc

SEQ ID NO: 58241 - RNA, 86 nt, Pseudomonas aeruginosa PA01
ggcguuggcgcgucgccucguccagcguguggguggcauccaccacccgcuccgacaggggcaaggcgacccauuccgccggcgcu

SEQ ID NO: 58242 - RNA, 59 nt, Pseudomonas aeruginosa PA01
ggcgugccgaacacauagcugcgggugauauccgacugguagccguggaccuggcagcc

SEQ ID NO: 58243 - RNA, 75 nt, Pseudomonas aeruginosa PA01
ggcggcgagcaggccgcucuccucgccgaucgccacgcaggucgcgccggcggcacaggcggccugcacgccgcu

SEQ ID NO: 58244 - RNA, 81 nt, Pseudomonas aeruginosa PA01
ggcggcuggcugacguccaggccgaaccacuuuuccgagagcuuggcgaagcggccgucggccuugaucuucuccagcgcc

SEQ ID NO: 58245 - RNA, 64 nt, Pseudomonas aeruginosa PA01
ggcggcuguauucggccagcuucucccgguacgggaccagcgcgaacaggccgggauagccgcc

SEQ ID NO: 58246 - RNA, 92 nt, Pseudomonas aeruginosa PA01
ggcggcuucuccgggaagagggucaggccggcuggucggccggggguucgcugucgccggccggggccgcuucggcuuccgggcgggccgcu

SEQ ID NO: 58247 - RNA, 55 nt, Pseudomonas aeruginosa PA01
ggcggcuugccgcccuccuccggagcgccacggagcaggucagcggcaugccgcu

SEQ ID NO: 58248 - RNA, 55 nt, Pseudomonas aeruginosa PA01
ggcgggcguuuccgcgcugacgauccgcgucgguaacgucgggacgcgcccggcc

SEQ ID NO: 58249 - RNA, 106 nt, Pseudomonas aeruginosa PA01
ggcgggcuuuccucgaaacgcagcugcgccuugccggcggcagcggugccgugggcggggccgcggcgccgcucugccgcaucgacgguugcgccugaaucccgcc

SEQ ID NO: 58250 - RNA, 79 nt, Pseudomonas aeruginosa PA01
ggcgguagccauggcuggggucgaccuuguugucggucuccagcagcgaguagccgauccccggcaucaggaagcugcu

SEQ ID NO: 58251 - RNA, 111 nt, Pseudomonas aeruginosa PA01
ggcggugccagaagccagugauacguugcagcagggccucguccagcgccaggccgaacucuccggccagggccucgagacucugccggugcaacuggucgaggugcugcc

SEQ ID NO: 58252 - RNA, 84 nt, Pseudomonas aeruginosa PA01
ggcggugcucgaggcgguggcgauccagcccggcgcgacgcuguucaccgugaugccgcucuucgccaccuccagcgcgaggcc

SEQ ID NO: 58253 - RNA, 55 nt, Pseudomonas aeruginosa PA01
ggggcucgccgaucaccccgguggaauauggcagcaccgaagucucggcgacccc

SEQ ID NO: 58254 - RNA, 89 nt, Pseudomonas aeruginosa PA01
ggggucauggguugcucgugucggucgcuuuucuaaugcgaaucaaucgcggucaugagcacuacacgaagcggcgccggauuuaccuc

SEQ ID NO: 58255 - RNA, 129 nt, Pseudomonas aeruginosa PA01
gggucagcgggcgcgucuggaaguucgggucggccucgaagucgcggaugucggcgacgaagaauucgaucucuucgcggagcagggcgcggcugagcuuuucccaguuguccacguccaggcugaucu

SEQ ID NO: 58256 - RNA, 57 nt, Pseudomonas aeruginosa PA01
ggggugauccagcucaccggcguggccagccgcuacgucggccuguggaucgccgcc

SEQ ID NO: 58257 - RNA, 81 nt, Pseudomonas aeruginosa PA01
gggucgaggcgucgagcaggccgaccgccucgcgcacugcgcggcauucgcgggccacggcggcgugcauguccucgcccc

SEQ ID NO: 58258 - RNA, 108 nt, Pseudomonas aeruginosa PA01
gggucgccaccuggaccagcccuucgcccuggcgggugaccagcacgucggccuucaggcggcgcugcuggccgugcaggucgagggugaagucgagcuucucgaccc

SEQ ID NO: 58259 - RNA, 102 nt, Pseudomonas aeruginosa PA01
gggucgccagcagcgcaccgaucugcgcgucgacguagcugcaggcgccgaaguaggcacgccgggcggcgcggaugcgcuccucgggcaacggcuuguccc

SEQ ID NO: 58260 - RNA, 69 nt, Pseudomonas aeruginosa PA01
gggcgguuuccucgaugucgccgcccuugguggcgcgcgccgaguugaugucgauggaaaccagggccu

SEQ ID NO: 58261 - RNA, 62 nt, Pseudomonas aeruginosa PA01
gggcgaggaagccgccggcgucgacuucgccggucaaccggcgcgcgcggcgcuccucgccu

SEQ ID NO: 58262 - RNA, 56 nt, Pseudomonas aeruginosa PA01
gggcgaggucgacaacggcgucgccugccccgccgggcaccgcuucgaccgcgccc

SEQ ID NO: 58263 - RNA, 88 nt, Pseudomonas aeruginosa PA01
gggcggagaucggccuggagcgcggccaggccuucagcgaauucagccgccaggucaccuauggccagcgcaccgccgacgaccgccu

SEQ ID NO: 58264 - RNA, 121 nt, Pseudomonas aeruginosa PA01
gggcuggcugcuugcggaagacgguggggaacggcuucucgugggacgcgcgcuugcaaagaaggaaaggcuccucuggaaccguucgaaccgccucagguuccuccccagcggccagcuc

SEQ ID NO: 58265 - RNA, 98 nt, Pseudomonas aeruginosa PA01
gggcugggaaagcgugcugcugcucggcggcggccugccccuggcgagccugccgcugcucugggcaugccugccggagucggugcgcuuccucgccc

SEQ ID NO: 58266 - RNA, 64 nt, Pseudomonas aeruginosa PA01
ggggccugggagaucgcccggcgcaccgaggaauacgccaagggcaugcugguccccggcaccc

SEQ ID NO: 58267 - RNA, 60 nt, Pseudomonas aeruginosa PA01
ggggcgggaaucgccuucugcucguugacgauauagucguggcagaugcgauccagcucc

SEQ ID NO: 58268 - RNA, 79 nt, Pseudomonas aeruginosa PA01
gguaggccgcgcuuuccggcuccaguugccagagaaaccacugucgcuccugggcauaggagagccgcaggggcucgcc

SEQ ID NO: 58269 - RNA, 64 nt, Pseudomonas aeruginosa PA01
ggguuggugcaugggguucucccguauccagaucgauugacgggagcaacgcuaugcccggcgc

SEQ ID NO: 58270 - RNA, 98 nt, Pseudomonas aeruginosa PA01
ggucacgguaagggcuguugcggcccggcucggugagggugccgcgguauucgcgcauuuccucgggaccgaggucgcagacgaacgccuugccggcc

SEQ ID NO: 58271 - RNA, 69 nt, Pseudomonas aeruginosa PA01
gguagugccggugggcuggaagguccggcuguagucgagcccgaugcgccagcccugcuugcgcgcgcc

SEQ ID NO: 58272 - RNA, 63 nt, Pseudomonas aeruginosa PA01
gguaugcgcgcccuucugucccaucuugcgauccggcuugcccagggacagcccgggcguacc

SEQ ID NO: 58273 - RNA, 55 nt, Pseudomonas aeruginosa PA01
ggucagggugaagccgucgguggcgccauagggcguacggcacagcgccuugucc

SEQ ID NO: 58274 - RNA, 73 nt, Pseudomonas aeruginosa PA01
ggucagcagcgagccgcacacgcccagcagcgaugcgcccagcagcaacuggcggugcgggcgggugcgggcc

SEQ ID NO: 58275 - RNA, 115 nt, Pseudomonas aeruginosa PA01
gguccgcgagcgcuucugguagcggaacagcgagccgacgccggggaggcuggagaguccgggaacgccgucgguguuguccugcacguuguccugcaacaggccgccgaggacc

SEQ ID NO: 58276 - RNA, 116 nt, Pseudomonas aeruginosa PA01
gguaccagcagccuguggcugaccggcagccuggucggcaagccggcagcggucuucaccuccaccgccagccugcacggcggccaggagaccacucaguuaucgaugcuguugcc

SEQ ID NO: 58277 - RNA, 58 nt, Pseudomonas aeruginosa PA01
gggugggauugcccugcaaggcuagcguaccuucgcaguuuggcauggcaacccaguc

SEQ ID NO: 58278 - RNA, 59 nt, Pseudomonas aeruginosa PA01
gggucuguucgaccaacugcgggguacugugcaucucgacgcuguucuggaucggaccc

SEQ ID NO: 58279 - RNA, 126 nt, Pseudomonas aeruginosa PA01
gggucggggcgcucgaaccagaagucggcgaagcgcugauggcggauguugccgacgcuguggugccaccaguagcuguccggaugcaccucgccgguguugucgauguuggcgaugcccucgccc

SEQ ID NO: 58280 - RNA, 64 nt, Pseudomonas aeruginosa PA01
gggucguggcgaugucggcguggccgagcaguuccugcacggcgcgcaggucgccggacgacuc

SEQ ID NO: 58281 - RNA, 61 nt, Pseudomonas aeruginosa PA01
gugcccgagguccugcugggggcggguacccugauccacaccgagcaguuucucgaggcgc

SEQ ID NO: 58282 - RNA, 81 nt, Pseudomonas aeruginosa PA01
gugcaucgguugcaaggccugccaggucgccugcucggaauggaacgagcugcgcgacgaggucggccacaaccacggcac

SEQ ID NO: 58283 - RNA, 71 nt, Pseudomonas aeruginosa PA01
gugcuggccaagcaguucgacguggccgagggcaagaucgucccgcgccacgaggaacgcguggccagggc

SEQ ID NO: 58284 - RNA, 81 nt, Pseudomonas aeruginosa PA01
guggaaaugaagacccgccgcgaugcgcugguacugguguuccucgguuucuucgcagugguggugggcuaccuguucgac

SEQ ID NO: 58285 - RNA, 56 nt, Pseudomonas aeruginosa PA01
gugcugaacaugagcuggggcggcuucggcgcgcugcucuacaucgccuucggcgc

SEQ ID NO: 58286 - RNA, 84 nt, Pseudomonas aeruginosa PA01
gugcggccuuccagcacgcgcucguagccgauguagaccggcacgaagacgaucggccggcgcgagucacggaggaagcugcgc

SEQ ID NO: 58287 - RNA, 76 nt, Pseudomonas aeruginosa PA01
gugaccgccggcagcggugggccccacggcugcgaagcguuucgcggccugucccaucccccgccugcgcggucac

SEQ ID NO: 58288 - RNA, 74 nt, Pseudomonas aeruginosa PA01
gugaagagcagcggccugcuggaguacgcucucggcgccgaugccggcagccucaagcagguggucaucgguac

SEQ ID NO: 58289 - RNA, 60 nt, Pseudomonas aeruginosa PA01
gugagcgggaggaucgaauugcaggcggugcgcuucgccuauccgacccgucccgaacac

SEQ ID NO: 58290 - RNA, 62 nt, Pseudomonas aeruginosa PA01
gucuuucccggauggauggagacgcggccccguauuuccggccccauccauccgagagagac

SEQ ID NO: 58291 - RNA, 55 nt, Pseudomonas aeruginosa PA01
gucuggaccggcccggcgcgaggggguucagguggcgugccgggcgguccgcgac

SEQ ID NO: 58292 - RNA, 76 nt, Pseudomonas aeruginosa PA01
gucuacgcugcuucaaggagcacuagacuauguuggauacaaugaggaaagucuggcuuuugaaguucugugugac

SEQ ID NO: 58293 - RNA, 56 nt, Pseudomonas aeruginosa PA01
gucguugcaggcgcccggcgaggaacggcaucgccucgccggcgccaugcagcagc

SEQ ID NO: 58294 - RNA, 56 nt, Pseudomonas aeruginosa PA01
gucuccuggaggcuucgcucggccugccaguagaggaugagcagccccaggacgau

SEQ ID NO: 58295 - RNA, 74 nt, Pseudomonas aeruginosa PA01
gucugcagggccuugucggucaggggaauuucacgcuugagcugcuccggcgugaucagggucucguuggaggc

SEQ ID NO: 58296 - RNA, 128 nt, Pseudomonas aeruginosa PA01
gucgacgguggcaacgaggggacgcauggcaucggguccugcaacugaaacgggugccuaugguaaggcgcccgccgggcaagacccaagccgggucauucguccucgaaguuguacaugccggcggc

SEQ ID NO: 58297 - RNA, 78 nt, Pseudomonas aeruginosa PA01
gucgccggcgaggccuucagccugaucaccggcgccgaccuggcgcugcucgaccuggagcuggaggccuugcccgac

SEQ ID NO: 58298 - RNA, 72 nt, Pseudomonas aeruginosa PA01
gucgcuacgcagcccguuccagccgccggugaagaucgaccugaccgugcggcagaagggcaacaaggugau

SEQ ID NO: 58299 - RNA, 89 nt, Pseudomonas aeruginosa PA01
gucgcugagcaccucgcugaccagcuugcuguuggucgccugguucggcgccaugccgaagcgcugguucagggaggcgccguagcgac

SEQ ID NO: 58300 - RNA, 74 nt, Pseudomonas aeruginosa PA01
gucgaggaaguguucuucguccugcgaggcaagcucaagguggugcuggagaaggacggcgagcgcuucgagac

SEQ ID NO: 58301 - RNA, 75 nt, Pseudomonas aeruginosa PA01
gucgaggcgcucgucggugaccggcgagaccagccgacgcggcucgcugaagacgcuacgggugucccauucgac

SEQ ID NO: 58302 - RNA, 91 nt, Pseudomonas aeruginosa PA01
gucgaucaacuccaccuucgaccaguuggccgcggccggcgucgcccaugccaccccggcugcggcagcggcggaggucggcguggucggc

SEQ ID NO: 58303 - RNA, 55 nt, Pseudomonas aeruginosa PA01
gucgccaugccauccucgcgcugcuuuccgagcagggcgaggucagcguggacgc

SEQ ID NO: 58304 - RNA, 69 nt, Pseudomonas aeruginosa PA01
gucgcccagcgccagucgcugcucgccgaacguauccucggcucggugaacaaggugcuggccggcgac

SEQ ID NO: 58305 - RNA, 78 nt, Pseudomonas aeruginosa PA01
gucgcccaggucgcccggcucguuggucacggcgaucugcuuggucaggccggcgcccagggagucgguacgggcgac

SEQ ID NO: 58306 - RNA, 86 nt, Pseudomonas aeruginosa PA01
gucggcaucaucauggccagcgaguucgccuucugcgccacuccgggcggcagcggcgggccguugacccugauggcguugcuggc

SEQ ID NO: 58307 - RNA, 126 nt, Pseudomonas aeruginosa PA01
gucggcauuccccucgcggagaucgcucgcgcccugcagacccugccggcggggcgcagcccuagcgcggcggacugggcgcgccugucggcgcaguggaaggaggaucucaccgagcgcaucgac

SEQ ID NO: 58308 - RNA, 56 nt, Pseudomonas aeruginosa PA01
gucggcgauggccgccagggcgcgcuccagguugugcgcggugucgccaucgcgac

SEQ ID NO: 58309 - RNA, 128 nt, Pseudomonas aeruginosa PA01
gucgcgaaggcaccugggucgaacugggccucggccucggcgccgcggugcucggccugcuggugcuguggcugagcgcccgcggcgugacccggccgauccucggcgucgcccacaugcugcgcgac

SEQ ID NO: 58310 - RNA, 71 nt, Pseudomonas aeruginosa PA01
gucgcgagcugcgcgaagcgcuggacgcucuccuugccgacugggcgccgcgcaucgagcgcggccgugac

SEQ ID NO: 58311 - RNA, 96 nt, Pseudomonas aeruginosa PA01
gucggucucgucgcaggacaaccaugccaccgccgcgcccugcuccagcaggcgcaggcgcaacuggcagaggauggugcucuugccgaagccggc

SEQ ID NO: 58312 - RNA, 99 nt, Pseudomonas aeruginosa PA01
gucggugaccuggcuggcgucccagcucggcaggcuuuccggcacgggcgugccgggcaggcgcuggagcaugucggcggcggcagagcgggcauagac

SEQ ID NO: 58313 - RNA, 84 nt, Pseudomonas aeruginosa PA01
gucggugaggaagagcuggaagcugcgcuggucgcugggguugcgcucgcggcggaccagguuucuucccuccagcucgcggau

SEQ ID NO: 58314 - RNA, 68 nt, Pseudomonas aeruginosa PA01
guggcuggccucguggggguggacgccggcggugguaaacagccggccgcccucgucgaguucgccgc

SEQ ID NO: 58315 - RNA, 89 nt, Pseudomonas aeruginosa PA01
gugggacagggcgugccguccggcaucagggcguaguccgggauuuccccgacccguguccagccggucuucagguacagccguucggc

SEQ ID NO: 58316 - RNA, 57 nt, Pseudomonas aeruginosa PA01
gugggcgcgaccucggcugcgguuuucgccgggaagccggggccgggcuguggccgc

SEQ ID NO: 58317 - RNA, 78 nt, Pseudomonas aeruginosa PA01
gugggcgggcugcgccaggguguugccaggcagggccggcaggcgcgccaggugcagcgagaccaauaccgcgaccac

SEQ ID NO: 58318 - RNA, 67 nt, Pseudomonas aeruginosa PA01
guggggcuccugguugccgggagcggcucggcgaugugccgccgcuucccguggccaggaguguugc

SEQ ID NO: 58319 - RNA, 113 nt, Pseudomonas aeruginosa PA01
guggggcuggcugggcgaccgcagcggccagcgccuggccaucgugcgcuucggcgcgguaugcacggcgcugggcuucucgcugaucuucgucagccacagcuacgccuggc

SEQ ID NO: 58320 - RNA, 126 nt, Pseudomonas aeruginosa PA01
guggcgguggcuucgggauggacgcgggcguucaugcggacuccugguaggcagcggggccguccggucgacggcuacccuggaguccgggccguugcacagccugugccgacccgcgcaggccac

SEQ ID NO: 58321 - RNA, 106 nt, Pseudomonas aeruginosa PA01
guggccagggucccggcgggcuucgccgccggcagcgcggcauccggcgccguggcgcguugcaggcugagcacgccggcggcgcugcggcuguauuccaggccgc

SEQ ID NO: 58322 - RNA, 128 nt, Pseudomonas aeruginosa PA01
guggcauugcuggaccgcaauaccaagccgcucaaacccaccgccagcggacugcgggucuacgaacagugccggcgggugcugcgcgagguggauggccugcgugaacugguggccggugacgccac

SEQ ID NO: 58323 - RNA, 89 nt, Pseudomonas aeruginosa PA01
guggcaagauccaccgcuucgcccugagcaacccgcacccggaaaucuccuggagcgcgcucuggggcaaggucugguacgagagcuac

SEQ ID NO: 58324 - RNA, 129 nt, Pseudomonas aeruginosa PA01
guguucgucguggaggaggcgaucggcucgcggcggccgagcgacaaggcgcuggccguggagcggaugcgccaggccggggcgaugaucgugucgcgggagauggucgccuucgaauggauggaacgc

SEQ ID NO: 58325 - RNA, 70 nt, Pseudomonas aeruginosa PA01
gugguuccgggcgggcgcccugccgaggcuggggcggcgucucgcuugguacgggcgcgcgacggaccau

SEQ ID NO: 58326 - RNA, 69 nt, Pseudomonas aeruginosa PA01
guugcaggcucgcucguucagcuuuccagcggcaccucuaugaggaagcggaacagcgcgccaugcugc

SEQ ID NO: 58327 - RNA, 114 nt, Pseudomonas aeruginosa PA01
guugcagggccggcggcgguagaccgcgcagcagcgcgcggaagcugucguccagccccuggcaguagcgcuccaggcgugccagcgccggcugcccgucgccugccgugcagc

SEQ ID NO: 58328 - RNA, 57 nt, Pseudomonas aeruginosa PA01
guugcaugaacggcgugccguucugggugaccaggaugccacccucguucaggcagc

SEQ ID NO: 58329 - RNA, 56 nt, Pseudomonas aeruginosa PA01
guugcccuucugccgcacggucaggucgaucuucaccggcggcuggaacgggcugc

SEQ ID NO: 58330 - RNA, 70 nt, Pseudomonas aeruginosa PA01
guugccgccagcuguagcgcaggcguugaugccgcaccaccagcgccucgcgcucggcaugacgcgcgac

SEQ ID NO: 58331 - RNA, 83 nt, Pseudomonas aeruginosa PA01
guugccggccucgcgggcgcggucgaggaucagcucggccaccgccgggguguccagcaccggccggguguagggcgggcagc

SEQ ID NO: 58332 - RNA, 65 nt, Pseudomonas aeruginosa PA01
guugccggcgcgccagaccaccuggucgccagucaccagugccggcagguuggcgcgcaggugac

SEQ ID NO: 58333 - RNA, 75 nt, Pseudomonas aeruginosa PA01
guugaccagguagugcaggccgcgccaggcgcuuuccaguugcuggaagucggcguggugcaugaucagguugac

SEQ ID NO: 58334 - RNA, 102 nt, Pseudomonas aeruginosa PA01
guugagcacguugaagcuggccacccgcaggcgcccuuccaccgccggcugggccggacgcggauuggccgccucgaaggucggcgucugcaacggcuggau

SEQ ID NO: 58335 - RNA, 95 nt, Pseudomonas aeruginosa PA01
guucggcgaggaaggugcggcucuucagcccggagagcuuuuccgccucgauguaguucaggucgaagaaguugcgcccgaccgcguuccagaac

SEQ ID NO: 58336 - RNA, 65 nt, Pseudomonas aeruginosa PA01
guucgucgagcagggccgccggcgccggcggaaccaggcgcgcaucgcggaccugcuccucgagc

SEQ ID NO: 58337 - RNA, 70 nt, Pseudomonas aeruginosa PA01
guucuccggcgccaaguucgcccugcgugcccuggcccagagcauggcgcgcgagcuggggccgaaggac

SEQ ID NO: 58338 - RNA, 67 nt, Pseudomonas aeruginosa PA01
guucugccaggccaacgaagccaacgaagccgucaaggaauucgucgcuccgcuggcacagcugaac

SEQ ID NO: 58339 - RNA, 78 nt, Pseudomonas aeruginosa PA01
guucgcgccgcccagccgcugcgccgccugcgccugcgcaacggcgcggagcgcuggucgcuguuccgcgacgugagc

SEQ ID NO: 58340 - RNA, 56 nt, Pseudomonas aeruginosa PA01
guucaggcugaccgggaugccuucguuggccagcucccaggcggucagucgcgagc

SEQ ID NO: 58341 - RNA, 56 nt, Pseudomonas aeruginosa PA01
guucgaccuccugcggcagguacucgaaauccaugccggccggcaggugaucgaac

SEQ ID NO: 58342 - RNA, 89 nt, Pseudomonas aeruginosa PA01
guucgacgagaucuucuccggcuucggcgagcagagcccggucaccccggugcgcgcccgcgagccggaggcgguggacaucgccgaau

SEQ ID NO: 58343 - RNA, 88 nt, Pseudomonas aeruginosa PA01
guucgccgauugccgcgaucuugaccuggcggcggaaaaggccgccuucggcauuuucuucaaccagggcgaggucuguucggcgaac

SEQ ID NO: 58344 - RNA, 82 nt, Pseudomonas aeruginosa PA01
guucgccguuucgcgccaggacaagcgcaaccccaacgacgccgaccggcugcgcaaguaccuggcgcguuucggccuggac

SEQ ID NO: 58345 - RNA, 80 nt, Pseudomonas aeruginosa PA01
guuccagcagcaacgcgaggcgcggaucgaguucaucaggaagcaauccuggaucgucggccgccuuggucagugggaau

SEQ ID NO: 58346 - RNA, 58 nt, Pseudomonas aeruginosa PA01
ggugguggcgcgcuuccaguagaucgcgccgaucagcgggaucagcaugccgccuacc

SEQ ID NO: 58347 - RNA, 55 nt, Pseudomonas aeruginosa PA01
gguggcgagaaucaggucgauccgcggcugcucccgggcgacccgcucgaccacc

SEQ ID NO: 58348 - RNA, 79 nt, Pseudomonas aeruginosa PA01
gguggcgcccggcuguaccgcuacgaucccagcgaugccucguggcagagcuggccgcugccggacagccaggcccgcc

SEQ ID NO: 58349 - RNA, 59 nt, Pseudomonas aeruginosa PA01
ggugggcgaugcgcgaggucagcgggguguagaugucgguguccucgugcacgucgauc

SEQ ID NO: 58350 - RNA, 85 nt, Pseudomonas aeruginosa PA01
gguggucgacuugcccgcuccguuggggccgaggagaccgacgaucucuccccggucgaugcggaagcucaagucguuuaccacc

SEQ ID NO: 58351 - RNA, 79 nt, Pseudomonas aeruginosa PA01
gguggucgaugcgaagagcgccaacgucgagggcuaugucaccgagcaggcccucgacgggcucuucgagaugaucgcc

SEQ ID NO: 58352 - RNA, 55 nt, Pseudomonas aeruginosa PA01
ggugcgcaccgucgagggcgaggaccucgacaucgccuucgacucggugugcauc

SEQ ID NO: 58353 - RNA, 79 nt, Pseudomonas aeruginosa PA01
ggugcugaugcucggcgacggagucaacgacguaccggugcucgccggugccgacaucagcgucgccaugggcagcgcc

SEQ ID NO: 58354 - RNA, 58 nt, Pseudomonas aeruginosa PA01
gguggcaggaugcgcagacuggagccccccaugugcgacacccugauccuucgccacc

SEQ ID NO: 58355 - RNA, 58 nt, Pseudomonas aeruginosa PA01
gguggccaguaccguggugcuguugcgcgcccuggagcagcgccaguugcuggacacc

SEQ ID NO: 58356 - RNA, 59 nt, Pseudomonas aeruginosa PA01
gguggccgaaccgcugcuggcgcgcuacuggacgccggccccgcaauucggucugggcc

SEQ ID NO: 58357 - RNA, 64 nt, Pseudomonas aeruginosa PA01
gguggccgaguucgcggccggugacgaggugaucgucaccggcuacgaccugggcaugaacacc

SEQ ID NO: 58358 - RNA, 121 nt, Pseudomonas aeruginosa PA01
gguggagacgaucugcuucgguuccagggucucgccguccaugaucgcgaacugcggcggccaguaggcgccggcgaugguguagcgguccucguagcccuugaacuuggagcuuuccacc

SEQ ID NO: 58359 - RNA, 65 nt, Pseudomonas aeruginosa PA01
gguggaggaggaagcgcgccagcaguugcugaacacggcgaagaugcccuucaucuucaagcacc

SEQ ID NO: 58360 - RNA, 58 nt, Pseudomonas aeruginosa PA01
gguguucgccgccggcggccuggacccgaccuucgucaucggcggccggcugaacgcc

SEQ ID NO: 58361 - RNA, 100 nt, Pseudomonas aeruginosa PA01
gguguugggcagcgccgccuugagcuugcgcaggcguucccacgggucuuccuugaggaagcgcacgcaggcgucgaagguggcgccgccccagacuucc

SEQ ID NO: 58362 - RNA, 94 nt, Pseudomonas aeruginosa PA01
gguucgauguugaugccgcgccagccgcgcucguagaacgccagggugaccgagucgauccgcgggugguuggcgccgacgucgauguagaacc

SEQ ID NO: 58363 - RNA, 63 nt, Pseudomonas aeruginosa PA01
gguugguggcggugugcgccgguuccgaccugaugcauccgaucggcgcgcuggcuaccggcc

SEQ ID NO: 58364 - RNA, 80 nt, Pseudomonas aeruginosa PA01
gguugccggugggcgagcccugcugggcgaaggcggcguacaggaugccuuugcccuugggcgcgcuuucgcuggcgauc

SEQ ID NO: 58365 - RNA, 61 nt, Pseudomonas aeruginosa PA01
gguugaacagcggcuggccggcggcguccggcgcgcagaccgccaccaguuguucgugacc

SEQ ID NO: 58366 - RNA, 81 nt, Pseudomonas aeruginosa PA01
gguugacccccgacgacgauccgcgcgaggugcucgguuuccucgacgagcgcagcgagcgcaaucuccugcuggucagcc

SEQ ID NO: 58367 - RNA, 103 nt, Pseudomonas aeruginosa PA01
gguugcggaauacgccgagcaauugcugcaggagcaccccgaagggguuuucaaccuggcgggauggucgcucggcggcaaccuggcgauggaugucgcggcc

SEQ ID NO: 58368 - RNA, 125 nt, Pseudomonas aeruginosa PA01
ggugaguuuccgcgggcgcuacgaggccccgcuuuccgcgccgggcagcggccguuugagcuggcagacguugcagagcggccuguucggcgggcaggccucgguccccgcggggagcauccgcc

SEQ ID NO: 58369 - RNA, 67 nt, Pseudomonas aeruginosa PA01
ggugaucgacaaccugaacgcgcggaucaacgccuggugggcgaugguccuggugaucgguuucgcc

SEQ ID NO: 58370 - RNA, 65 nt, Pseudomonas aeruginosa PA01
ggugagcgagcggccggacuucggcgagauccaggcgaucuugcgcgaccuugccgcucgcagcc

SEQ ID NO: 58371 - RNA, 123 nt, Pseudomonas aeruginosa PA01
ggugaucuuccugcacggcuggagcgugaugcagccggaccucuaccgcgccuggaucgaccauaucguccgccgcggcauggugguggucuacccacgcuaccagccggaccugaagacgcc

SEQ ID NO: 58372 - RNA, 60 nt, Pseudomonas aeruginosa PA01
ggugcgcggcgccucguccucgacccagaacuuggugcggaagaaggcgcgcguauagcc

SEQ ID NO: 58373 - RNA, 76 nt, Pseudomonas aeruginosa PA01
ggugcggcaguuccucuucuggcuggaggcgcgcagcccccaggccgcgcgcggcuagaggaagagucgcuucacc

SEQ ID NO: 58374 - RNA, 82 nt, Pseudomonas aeruginosa PA01
ggugcggccgggcaggccgccgaugcugaccucggccgggcggccggcguacugggcgucgagcggcuggucgggcuggauc

SEQ ID NO: 58375 - RNA, 55 nt, Pseudomonas aeruginosa PA01
ggugcggcgaaggcggcgaugaagaugaagaacaugccgaggaaaccgccgcacc

SEQ ID NO: 58376 - RNA, 55 nt, Pseudomonas aeruginosa PA01
ggugcggcgguuuccucggcauguucuucaucuucaucgccgccuucgccgcacc

SEQ ID NO: 58377 - RNA, 85 nt, Pseudomonas aeruginosa PA01
ggugcgggcgucggcgaguuccgcggagaucgcguugcuggcgcgcaggcguucgccgcgcugggcuucguugacgcuccgcgcc

SEQ ID NO: 58378 - RNA, 62 nt, Pseudomonas aeruginosa PA01
ggugccgccggacggucagccgaucguccugcucaacgaccggcagaccaucggcggcuacc

SEQ ID NO: 58379 - RNA, 93 nt, Pseudomonas aeruginosa PA01
ggugccggugcagauguagcugccgccguccgccgagcuggugaagaccaucuucgccaccgcugcgguggcguugucguaggcccgugugcc

SEQ ID NO: 58380 - RNA, 61 nt, Pseudomonas aeruginosa PA01
ggugcccuccacccgcgagaaacugcagugcggcagguagucgcggaacuggcgggcgucc

SEQ ID NO: 58381 - RNA, 56 nt, Pseudomonas aeruginosa PA01
ggugccagggcuacagcgagcccaacgccggcuccgaccuggccagccugcgcacc

SEQ ID NO: 58382 - RNA, 59 nt, Pseudomonas aeruginosa PA01
ggucgccgggucgucccagccacgggagaucauccaggcgcggaugcggcccagcgacc

SEQ ID NO: 58383 - RNA, 109 nt, Pseudomonas aeruginosa PA01
ggucgacggcgugcagguagcagccguccagcuugagguaggccagccccagauggguaagguugccgaucaggcugaagcggccgccgaaaugcugcaggccgagacc

SEQ ID NO: 58384 - RNA, 88 nt, Pseudomonas aeruginosa PA01
ggucgacugucccccgaggaccgcgcgcgcgccgggaucggcgacagccugauccgggucgcggucggccuggaagaccucgacgacc

SEQ ID NO: 58385 - RNA, 61 nt, Pseudomonas aeruginosa PA01
ggucgagcagcaggcgcacaggaugcacucguacagaccguccagcuucucgcgcucuucc

SEQ ID NO: 58386 - RNA, 100 nt, Pseudomonas aeruginosa PA01
ggucggagcgauccgccuggcgcugauguugcugaucgccaucgucaucgccguggcgaugaagaucgucggcguacugcugaucaccucgcugcugauc

SEQ ID NO: 58387 - RNA, 82 nt, Pseudomonas aeruginosa PA01
ggucgccgagggccuggcgccggaggucgcgucgcggcucgucgagcuugcccggcaggcuuucgaccaggccuucgucgcc

SEQ ID NO: 58388 - RNA, 88 nt, Pseudomonas aeruginosa PA01
ggucgccgccgacgcgccauuugugcaguucgccggguagcguauagcugguggcgagcuugaacagguggcguggcuuggccgcguc

SEQ ID NO: 58389 - RNA, 92 nt, Pseudomonas aeruginosa PA01
ggucgccgcgcugguguucuggcgcgugcugcccgagucgaaacacuuccggccggcaccgcugaagccggcgacccugcucaacggcuacc

SEQ ID NO: 58390 - RNA, 77 nt, Pseudomonas aeruginosa PA01
gguccaguucguagcgggagaucgccaguugauggcgcgagccguauucgcagaccuuuuccgagacguacuggacc

SEQ ID NO: 58391 - RNA, 118 nt, Pseudomonas aeruginosa PA01
ggucuugcagucgaugcagagggucgcgguggggcgcgccuccaggcgacggaugccgaucucgacgccgcaggagucgcaccagccguacucuucgucuucgaucaguugcaggguc

SEQ ID NO: 58392 - RNA, 73 nt, Pseudomonas aeruginosa PA01
ggucgugcagcguggccuucuccucggacagccagcgcugcuggagaaugucgcggcugcgcucgucgaggcc

SEQ ID NO: 58393 - RNA, 70 nt, Pseudomonas aeruginosa PA01
ggucguucccuggccuuccagcgugccgccuugcuggcgcagggcggcuugcaggaaggcuucggcgauc

SEQ ID NO: 58394 - RNA, 80 nt, Pseudomonas aeruginosa PA01
ggucgguggcgggaucguaguccucgcuggcgcgcugccccgaagcgacccggugauacacggcgaagaaugccaccgcc

SEQ ID NO: 58395 - RNA, 62 nt, Pseudomonas aeruginosa PA01
ggucggcggcgaugaggccgcgacccugcaccugcgcugcggcaacgacaucgcccacggcc

SEQ ID NO: 58396 - RNA, 55 nt, Pseudomonas aeruginosa PA01
guccgcucgaucuccgccuggcucaggugcggguugcgguugugguugagcaggc

SEQ ID NO: 58397 - RNA, 73 nt, Pseudomonas aeruginosa PA01
guccggcgaccagcggcgcguggcggucgcccucggggguuuccagcagcagcgugccgucggucagcgguac

SEQ ID NO: 58398 - RNA, 75 nt, Pseudomonas aeruginosa PA01
guccguacugggucuccaccggcgagcgccuguuguucuucgccggcaucugggaggccuauccggugcauggac

SEQ ID NO: 58399 - RNA, 69 nt, Pseudomonas aeruginosa PA01
guccucggugagcgccgaggagcagaccagcagcuggcagcucagggugcucaugaccgcggcgaggau

SEQ ID NO: 58400 - RNA, 60 nt, Pseudomonas aeruginosa PA01
guccagcgcagcaccagcucgccgccguagaccuggccaucgacgcucagcucguugggc

SEQ ID NO: 58401 - RNA, 60 nt, Pseudomonas aeruginosa PA01
guccagcgcgugcgccugccacgggugcucaccgccugccuggucggcgccgcgcugggc

SEQ ID NO: 58402 - RNA, 69 nt, Pseudomonas aeruginosa PA01
gucgacuacgcgcugauggagcgcucggacaaggucgccguggugcccugcuccaucggcuggagcgac

SEQ ID NO: 58403 - RNA, 75 nt, Pseudomonas aeruginosa PA01
gucgagcccgcgcuuguggcacucgugggcgauggcuuccucgaagucgcugaugaaguucaccgcggucuugac

SEQ ID NO: 58404 - RNA, 76 nt, Pseudomonas aeruginosa PA01
gucgacgccgagcaucucgcccuuggugacgcgcuccggguuguagcgggucagcagcagguguuccuugaucggc

SEQ ID NO: 58405 - RNA, 90 nt, Pseudomonas aeruginosa PA01
gucgacgccggagucgacccagggccgggcgcgcucgcggacgaaacgcaggguguccucgaaggcgccgcgggcgaucccggcgucgau

SEQ ID NO: 58406 - RNA, 72 nt, Pseudomonas aeruginosa PA01
guccuggucagccuguucucgcggcgcccgacgggugucgccagcgccgccugaaccaggcacaaccccgac

SEQ ID NO: 58407 - RNA, 70 nt, Pseudomonas aeruginosa PA01
guccuucccgcgcucggugggccagguuccgguuuacuacaaccaccugaacaccggccggccgauggac

SEQ ID NO: 58408 - RNA, 99 nt, Pseudomonas aeruginosa PA01
gucgaacagcaucaccugcggcuccauggccagggcgcgggcgaucgccacgcgcuguugcuggccgccggagaguucgcagggauacugccguucgac

SEQ ID NO: 58409 - RNA, 130 nt, Pseudomonas aeruginosa PA01
gucaucgccuugacccccgccaaccggccgaagcgcgcgccgggccuguucagggugcacauccagucacgcgccacgccgacguccucggcgcgcagccuggccuucuucucggcgguggugaggaugc

SEQ ID NO: 58410 - RNA, 71 nt, Pseudomonas aeruginosa PA01
guccacuucgcagcgcugcgcgagcagggugucgcgacgcggcgccugcucgaucagguugagcaccggac

SEQ ID NO: 58411 - RNA, 72 nt, Pseudomonas aeruginosa PA01
guagcaccgauggacgaggacgaggaugucgaggagaucaucuucucggcgcgcuucgccugcccggucugc

SEQ ID NO: 58412 - RNA, 103 nt, Pseudomonas aeruginosa PA01
guagaccgcgcggcccauaucgaacagcuugcgcuccacggcguaggccagggugcucuugccggcgccggagaggccgcugaacaguacggucgccggcugc

SEQ ID NO: 58413 - RNA, 127 nt, Pseudomonas aeruginosa PA01
guagagccccggcgcguuaccggcggcacgcggcgcgcgggcgucuuccucguccucggcgccgucgcugccgacccggaggauuuccgccgccgccaccccuuccggauacggcaguucgcucugc

SEQ ID NO: 58414 - RNA, 63 nt, Pseudomonas aeruginosa PA01
guaccggccucggcgcgcugugcgacguccugcuggaaggcgagcagcucgccgagcugucgc

SEQ ID NO: 58415 - RNA, 82 nt, Pseudomonas aeruginosa PA01
guaccuggcggagggcgaguuccugguggaugucggcuucggcucggccaauccgccgcgagcacugccuuugccgggcgac

SEQ ID NO: 58416 - RNA, 84 nt, Pseudomonas aeruginosa PA01
guagggcgaauagccgcucgcggcuauccgccggcugggguuccggugcgcuggcggauagcgcuggggcgcuauucgcccuac

SEQ ID NO: 58417 - RNA, 61 nt, Pseudomonas aeruginosa PA01
guacaucgucgucgcccuggucaugcugguccgcggcuucgccgacgcgaucaugaugcgc

SEQ ID NO: 58418 - RNA, 76 nt, Pseudomonas aeruginosa PA01
guaacgucgcgucagcgccaggaguuguccggcggcgucacgccagccgcucgacgacgggcagacgcaucgccgc

SEQ ID NO: 58419 - RNA, 80 nt, Pseudomonas aeruginosa PA01
guaagcaucgaacugagucucggcaaucauagacagaaucugauuauuacgauuauugaaauucauaagaugcuccuugc

SEQ ID NO: 58420 - RNA, 60 nt, Pseudomonas aeruginosa PA01
uucgacggcgaccgcgcccuggcccggguguccggccaugaccggcgcggacgccgcgaa

SEQ ID NO: 58421 - RNA, 105 nt, Pseudomonas aeruginosa PA01
uuccccaggucagcgggcuggucgccgagcgcggcuggcggauccgcgaacuggacguggagcgcggccggcucgacgagguauuccgcaaccugacccggggga

SEQ ID NO: 58422 - RNA, 69 nt, Pseudomonas aeruginosa PA01
uuccaugacguacuugucgcccaccagccacagcucgauggcgcgcucgaaguaacugaagucguggaa

SEQ ID NO: 58423 - RNA, 78 nt, Pseudomonas aeruginosa PA01
uucgccgacagcgccagcggccggcuccugcgcgaggucuacgacgcgcggguacggcagauggcggcguccggcgag

SEQ ID NO: 58424 - RNA, 60 nt, Pseudomonas aeruginosa PA01
uucgccgaggagaccuggcggguaccgggcuaccgggccugccugcuguuucccggcgag

SEQ ID NO: 58425 - RNA, 64 nt, Pseudomonas aeruginosa PA01
uucgcgcuggaacgacgucuaccugacucuccggggccaguacggcgcgcgcuccagccgcgaa

SEQ ID NO: 58426 - RNA, 66 nt, Pseudomonas aeruginosa PA01
uucggccuccuucagcuuggccaguacuucgucacgcaauucggggguggccauggggaagccgag

SEQ ID NO: 58427 - RNA, 116 nt, Pseudomonas aeruginosa PA01
uucuucagcggcaggccgcuccagucgcggacuaccugggugccgagccgggcgaaccaguccucgauuucccggcucugcucggcgugggccgcgagcggccgcgagcuggagaa

SEQ ID NO: 58428 - RNA, 94 nt, Pseudomonas aeruginosa PA01
uucgucgccaggaguugggcugagcuucaggcuuccgccuggugccgguacgcgccgggggugaggccgguccacuucuugaacgcgcgaugga

SEQ ID NO: 58429 - RNA, 60 nt, Pseudomonas aeruginosa PA01
uucgucggcgaacuccgagcgcagcaggucggucucguugcgccccugguucucgaugaa

SEQ ID NO: 58430 - RNA, 76 nt, Pseudomonas aeruginosa PA01
uucucgacugcuucuucgauaccgccgaccauguagaacgccugcuccggcaggugaucguagucgccguugagaa

SEQ ID NO: 58431 - RNA, 83 nt, Pseudomonas aeruginosa PA01
uucugguauucgccgucgaugaccucguccaugcgcugcugcagcaggccggcgguguccuuggcgaacagcgggucccagaa

SEQ ID NO: 58432 - RNA, 61 nt, Pseudomonas aeruginosa PA01
uucugcgcgugcagcaccggcacgucgaccacuuccuugaugccggccgccaggugcagga

SEQ ID NO: 58433 - RNA, 110 nt, Pseudomonas aeruginosa PA01
uucagcgcgaucugccgcaccgugacgaucucccugggcagccccuugaguugcuggcggguggauuccagggcgcugucggaggaggcgaucaggcggaucgaguugaa

SEQ ID NO: 58434 - RNA, 80 nt, Pseudomonas aeruginosa PA01
uucagcuuggcgaggaugcgcugcggcuucucguccgaccagucgcugagcagcaccacguagucgcggucguagcugaa

SEQ ID NO: 58435 - RNA, 77 nt, Pseudomonas aeruginosa PA01
uucaaggugccgauauccacgucgacgcucacucccagcaaggguucggcggcggaggcguggguuucgcauucgaa

SEQ ID NO: 58436 - RNA, 130 nt, Pseudomonas aeruginosa PA01
uggggaaugcgcaggacgaaccuggccgagaccacgaugcgcuccgaguagccgccgaaggucggcaggccgucguggcggucgcggccguuguaggucagggucggguauuccgcgcaauacugcucca

SEQ ID NO: 58437 - RNA, 129 nt, Pseudomonas aeruginosa PA01
uggcgcgccuggaugccgggcaacucgccgaggcgcgcaaggcgcuguucguggucagcaccuucggcgacggugaggcgccggacagcgcccgcggcuucgaacgcaaggugcuuggccaggccgcca

SEQ ID NO: 58438 - RNA, 69 nt, Pseudomonas aeruginosa PA01
uggcggcgcuggucauggccuugcucucgucgcugccgaaaccgcgcgaggaacuggccggcggcgccg

SEQ ID NO: 58439 - RNA, 129 nt, Pseudomonas aeruginosa PA01
uggcggugagcggcgcccccucuucgcugacgaacgccggcagccacugcgccugcugcgaggggcugccccagcggcggaugcaguuggccgccgacaacggcaccagcagggccgccgccagcguca

SEQ ID NO: 58440 - RNA, 96 nt, Pseudomonas aeruginosa PA01
uggcgaugccgguguccucgaucacgucgugcagcaucgcggccaucaggcucugaugguccaugugcaugucggcgaggauguuggagaccgcca

SEQ ID NO: 58441 - RNA, 61 nt, Pseudomonas aeruginosa PA01
ugggagcuuuccagugccgggaugaugccuucgaggcggcagcagguguggaaggccucca

SEQ ID NO: 58442 - RNA, 62 nt, Pseudomonas aeruginosa PA01
ugggaaugucggucgccagcugcagggcuuccugggccagcagcucggcgccggccagcucg

SEQ ID NO: 58443 - RNA, 73 nt, Pseudomonas aeruginosa PA01
uggugaccugccuggagggcagcgugcggcucgaacaccucggccagcgccuggaccuccaggccggccagca

SEQ ID NO: 58444 - RNA, 60 nt, Pseudomonas aeruginosa PA01
uggucgacccgccgacgccguucagcaccaguucgugccaaaccucgucggcggggguca

SEQ ID NO: 58445 - RNA, 67 nt, Pseudomonas aeruginosa PA01
ugguggcgggacaaugacacuggccucauuaggcaaugggggcaggucacuugccccgccgaugccg

SEQ ID NO: 58446 - RNA, 58 nt, Pseudomonas aeruginosa PA01
ugguaucgcucggcgccggcggcgcgcccagggugccggcggcgaccuggcgguucug

SEQ ID NO: 58447 - RNA, 128 nt, Pseudomonas aeruginosa PA01
uggguacguccaggucuucgaagucgcugaagaucuuguuggcuucgagguugcccgccaucaguuccucgucgggcagcuggaaguugucaacgaacucggugaugucggcaccaacgaugaacacg

SEQ ID NO: 58448 - RNA, 74 nt, Pseudomonas aeruginosa PA01
ugguucgagcgccccgacccgcugcuccugcaacugcgccagcgcccgcgaccgguggucgggcgcugcagcca

SEQ ID NO: 58449 - RNA, 65 nt, Pseudomonas aeruginosa PA01
uguaugcgguggcgauaccggugauggcguuggucgcgcccgggccggaagucaccagcacgaca

SEQ ID NO: 58450 - RNA, 75 nt, Pseudomonas aeruginosa PA01
uguccggcggcgaacagcagaugcucgccaucggccgcgcgcugaugagcaagccaaagcuguugcuguuggacg

SEQ ID NO: 58451 - RNA, 117 nt, Pseudomonas aeruginosa PA01
uguucgucuugcgcccgucgcugcucgaccauggccugggcggcgccgacuaugucacggcggucggcgagcaacgccaggugcaggugagcggcgagacgcggaucgagaugaaca

SEQ ID NO: 58452 - RNA, 87 nt, Pseudomonas aeruginosa PA01
ugugcgugcgcaggccggcggccuugccgcucugcucgcgcucguagccgaguaccgcgccgagcgccgccgccagcagcaggcgca

SEQ ID NO: 58453 - RNA, 75 nt, Pseudomonas aeruginosa PA01
ugcggucgguuuccgccacuuccugcucaugaggcaccaggcuuucgcggacgaacuggcggaugcuguccagca

SEQ ID NO: 58454 - RNA, 111 nt, Pseudomonas aeruginosa PA01
ugcggagaucgccagccuggugcaggcagugggcgaggaugucggacuggcgcggcagguugugcuggccggcgcuucgacgcuguuguccgccggccugaugucgccgca

SEQ ID NO: 58455 - RNA, 60 nt, Pseudomonas aeruginosa PA01
ugcggauggucaucgaccuggcggacuucgacaacucgcgcuacgcgcuguccacccgca

SEQ ID NO: 58456 - RNA, 74 nt, Pseudomonas aeruginosa PA01
ugcggcaguugcguggguuggaaguggcgcugaccgaggucggcgcggcgaacuucacccaugcccuggcggcg

SEQ ID NO: 58457 - RNA, 66 nt, Pseudomonas aeruginosa PA01
ugcucgccaccggcggcucgaccaaccacacccugcaccugcuggcgaucgcccaggcggcgggca

SEQ ID NO: 58458 - RNA, 63 nt, Pseudomonas aeruginosa PA01
ugcugccuucuucauguccggaguuuuugauaagacuagucccgauguugacagaauguggua

SEQ ID NO: 58459 - RNA, 64 nt, Pseudomonas aeruginosa PA01
ugcuggccuacgccgcggcgcugcugugcgggggggaaaucagcaggcccggcguaguccagca

SEQ ID NO: 58460 - RNA, 68 nt, Pseudomonas aeruginosa PA01
uggccgcgcuggcggaggaggaagucggcgccggcgcgcagguguuccuccaguugccggcgcgaacg

SEQ ID NO: 58461 - RNA, 121 nt, Pseudomonas aeruginosa PA01
uggccgaccugacccggcgcaucgccgagcugcucggccagccugcgccgcagccgaugucgauggccauggcucgcgcgcuggccacccugggccgcuugcgcuaccgggucagcggcca

SEQ ID NO: 58462 - RNA, 57 nt, Pseudomonas aeruginosa PA01
uggccagcucggcgccggcaugauaggccauggcguagccgucgccggcguuggucg

SEQ ID NO: 58463 - RNA, 115 nt, Pseudomonas aeruginosa PA01
uggcaaggcuucggccgaguggcgggaggcccuggauaccauggacgagcugaucuggagcgucggcccgcaugaugauccgcugucccgccaacaguugcuggagcgugugcca

SEQ ID NO: 58464 - RNA, 71 nt, Pseudomonas aeruginosa PA01
uggagcggacgccggccguugcaauggcuguacgagaacgucgcggucgaccagcgcuggugccuggucca

SEQ ID NO: 58465 - RNA, 70 nt, Pseudomonas aeruginosa PA01
uggauggaggguaagugucgcuaaaggugcugguuguaaguacagagccuuccacgcauauccuucagca

SEQ ID NO: 58466 - RNA, 59 nt, Pseudomonas aeruginosa PA01
ugccggcgaggucggccaugacgcccaugacgaagggcagcuggaccuucuucucggca

SEQ ID NO: 58467 - RNA, 61 nt, Pseudomonas aeruginosa PA01
ugccggcgcaggaaagggaucugcgcgguagugaugcgccccagguccuggccgccgagca

SEQ ID NO: 58468 - RNA, 60 nt, Pseudomonas aeruginosa PA01
ugccggcgcaguucgggcgcaaguccaccgaccugaucugcgucgaggaaggcgucggca

SEQ ID NO: 58469 - RNA, 59 nt, Pseudomonas aeruginosa PA01
ugccgggaguagcgguucaccccggcaaagcugucggccuugguggcggucucccggcg

SEQ ID NO: 58470 - RNA, 85 nt, Pseudomonas aeruginosa PA01
ugccguguuccuccagcacccggccgacgaucugcggcaccgugaggugcuggaagaugcgcugguuggugcgcugggcgaggua

SEQ ID NO: 58471 - RNA, 64 nt, Pseudomonas aeruginosa PA01
ugcccggcgacccgcgcggaggacgucgaacugcacgaccgccugcuccgcgauugccugggcg

SEQ ID NO: 58472 - RNA, 74 nt, Pseudomonas aeruginosa PA01
ugcccuggaucacgcagagccggucgaccgccuggcugacuucggccagggggcgccguucgcggaccagguca

SEQ ID NO: 58473 - RNA, 96 nt, Pseudomonas aeruginosa PA01
ugccgcgcuucacgaccggcuccaccgaacuggaccggguucucggcggcggccugguggacgguucgguggugcugaucggcggcgaucccggca

SEQ ID NO: 58474 - RNA, 71 nt, Pseudomonas aeruginosa PA01
ugccgauggcgacgccgccgaucagguugaugaagagaaucagcaggccggcgauggcgucgccgcggacg

SEQ ID NO: 58475 - RNA, 94 nt, Pseudomonas aeruginosa PA01
ugcgccggcaucaaguacggcccgccguaggccugcgcuccucgaccuggcuugucucaggaagcguggcuggcggucaccgggcgcucgcgca

SEQ ID NO: 58476 - RNA, 62 nt, Pseudomonas aeruginosa PA01
ugccuugcgccggcccuggcuagacuggcgcggcccgguuccgucgcgguuggcggaaggcg

SEQ ID NO: 58477 - RNA, 66 nt, Pseudomonas aeruginosa PA01
ugcgcgcaguuuacccggagaaccccgccauggggcgggcuucuaccggaaaagcggcgccaggca

SEQ ID NO: 58478 - RNA, 72 nt, Pseudomonas aeruginosa PA01
ugcgcggcgcgcaccuggaccgcaacaagcugaacagcuccagcgacuaccagguguucagcgccaaccgca

SEQ ID NO: 58479 - RNA, 66 nt, Pseudomonas aeruginosa PA01
ugcgcagcggcugcgccuggaacggcucgcucuaccucggcuauccccucggccagccgcagcuca

SEQ ID NO: 58480 - RNA, 63 nt, Pseudomonas aeruginosa PA01
ugcgcagcugcgagcugaucuggucgaugacgaacaggcugggguagagauugagguugcgca

SEQ ID NO: 58481 - RNA, 115 nt, Pseudomonas aeruginosa PA01
ugcgcauccugcugccgauguccacgcccaucgugauggucugccugaucuggcaguucacccagaucuggaacgacuuccuguucggcgugguguucgccagcggcgauucgca

SEQ ID NO: 58482 - RNA, 59 nt, Pseudomonas aeruginosa PA01
ugcagcacggccugguugucccaccagacgaugucgcccaccgaccaggcguggcugua

SEQ ID NO: 58483 - RNA, 102 nt, Pseudomonas aeruginosa PA01
ugcaccgcuggagcgacuacgccagcgcguucuuggccugccagcggagauucgcccggccugccuggacgcgcugcgcgccgaccguugccugcggcugca

SEQ ID NO: 58484 - RNA, 124 nt, Pseudomonas aeruginosa PA01
ugcacggccugcgacaggcgucgcuuccagccgccggagcgcuugccguugccgcucaucagcggcgccagggaguggcuccgcgcccgcuggcgcugcgacuccauguagaaggccuugugca

SEQ ID NO: 58485 - RNA, 63 nt, Pseudomonas aeruginosa PA01
ucuugaucagcgaguggccggucuuccacaucaccggacggccgccguagccgcugaucaggg

SEQ ID NO: 58486 - RNA, 73 nt, Pseudomonas aeruginosa PA01
ucuuccugcucguccugguacuccagggccagggugugggaaagguccggggucaggucgcugagcagggaga

SEQ ID NO: 58487 - RNA, 71 nt, Pseudomonas aeruginosa PA01
ucuggcgaccagccugcacgagggcauucaacuggcccacgaugcccugcacaccgggcuggcacgggaga

SEQ ID NO: 58488 - RNA, 98 nt, Pseudomonas aeruginosa PA01
ucucggcggcacggaacuggccgauguuggcgcugagcaggacgaucaggucuuccucggcgaucacccggcgcucggccagggccagcaggccgggg

SEQ ID NO: 58489 - RNA, 60 nt, Pseudomonas aeruginosa PA01
ucucguagguguacucgucgguggcgcgcagcucgcgcggcgugucguacuccuccggga

SEQ ID NO: 58490 - RNA, 59 nt, Pseudomonas aeruginosa PA01
ucucgucgcugcuggcaccgaccaccacccagucgauaucggugaccggacggccgaga

SEQ ID NO: 58491 - RNA, 69 nt, Pseudomonas aeruginosa PA01
ugagcugcggacgcucgaagaccacccgcgccacuacugcgugaucaucccagagcgccugccagcuca

SEQ ID NO: 58492 - RNA, 69 nt, Pseudomonas aeruginosa PA01
ugaucaccgucggccuggccgcugcgcuggcccugggccugggcagccgcgaggucgccgggcagauca

SEQ ID NO: 58493 - RNA, 108 nt, Pseudomonas aeruginosa PA01
ugaucacucguccggugccgaucacgcacuggaauggccggccgcgcucguaggaggagucgaacagcgugccgucuuccagggugcccuuguacuggguggugauca

SEQ ID NO: 58494 - RNA, 69 nt, Pseudomonas aeruginosa PA01
ugaucugcccggcgaccucgcggcugcccaggcccagggccagcgcagcggccaggccgacggugauca

SEQ ID NO: 58495 - RNA, 87 nt, Pseudomonas aeruginosa PA01
ugaucgugccgaugcugaagagcgucgagauccaguugggcaucuucuucgugguccugaccuacuucgucaucgucggcucgagca

SEQ ID NO: 58496 - RNA, 82 nt, Pseudomonas aeruginosa PA01
ucggcugccuuggcgacgaugccuacggcgaccaguuguaccgugcgcuacaggccgagggcaucgacugccagggcgucga

SEQ ID NO: 58497 - RNA, 57 nt, Pseudomonas aeruginosa PA01
ucgggauuuccaccgacaagcugcacgcccgcggcccggucggccuggaaggccuga

SEQ ID NO: 58498 - RNA, 76 nt, Pseudomonas aeruginosa PA01
ucggugccugccucggcgccggcggcuaucguguacugaucgcgcgccaucugccgagcgccgcggcgcccgccga

SEQ ID NO: 58499 - RNA, 69 nt, Pseudomonas aeruginosa PA01
ucggugcgcugguggucgagcagcacccgggcguugucggcguagcugcggaucgccgccagcggcugg

SEQ ID NO: 58500 - RNA, 55 nt, Pseudomonas aeruginosa PA01
ucggcgagcugcuccgcguggcugcugcccuugagcaccaugaugcgcuugccga

SEQ ID NO: 58501 - RNA, 91 nt, Pseudomonas aeruginosa PA01
ucggcgaucccaguggccgcugccgcugcaccccggaacagguccagcgcuaccggggcaagcuguccggaccgcugcucgaucgcaucga

SEQ ID NO: 58502 - RNA, 117 nt, Pseudomonas aeruginosa PA01
ucggccuuguguuccugguauuuuuccgccgacugggccugccggugcaggcguuccaguugccgccccagcucuucgcgcaggucggugaggcgugccagguuuuccuggguccga

SEQ ID NO: 58503 - RNA, 79 nt, Pseudomonas aeruginosa PA01
ucgugaagaacccggaagugaaggucggcgaccuggccaagcaggccggugccgaaaucguuuccuucguucguuacga

SEQ ID NO: 58504 - RNA, 61 nt, Pseudomonas aeruginosa PA01
ucgucggcccgcugcaacugccaggugcccagccagagcaguaccggcagcaggccgagga

SEQ ID NO: 58505 - RNA, 97 nt, Pseudomonas aeruginosa PA01
ucguccucgccgagguacucgccgcucuguaccucgaucaucaccaggucgaugauccccggauugcucaggcgguggcuaugcccggcggggauga

SEQ ID NO: 58506 - RNA, 64 nt, Pseudomonas aeruginosa PA01
ucgucgaagagcccgaacgcuuccggcgcggccgcucguuccggagcgcccgggccuucgucga

SEQ ID NO: 58507 - RNA, 61 nt, Pseudomonas aeruginosa PA01
ucgucgaccaggucggccuuguucagcagcagcagcggcuggaugccggcauguucggcgg

SEQ ID NO: 58508 - RNA, 58 nt, Pseudomonas aeruginosa PA01
ucgucgagggugccgaagccgccggggcagagcaccagggcgucggcuuccuugacga

SEQ ID NO: 58509 - RNA, 64 nt, Pseudomonas aeruginosa PA01
ucgguggcgcccugcaucaggcgcgccucgaggaacaggccgcucugcugcagggccuggccga

SEQ ID NO: 58510 - RNA, 100 nt, Pseudomonas aeruginosa PA01
ucguacccgcgguggccaucggcuggcgucucgccgccgagcauugggcggagggcuucgcccacgaggcggccgaggcggcgcugagcuacgccuucga

SEQ ID NO: 58511 - RNA, 80 nt, Pseudomonas aeruginosa PA01
ucucgacgaaggcuuuccaggcagggccguccuccgguccuagcucgucgaggaauaucugccuggcgcucucguggagg

SEQ ID NO: 58512 - RNA, 77 nt, Pseudomonas aeruginosa PA01
ucuagaucggggguuuuacgugucuguggcggcaucggcugagugcuguuccgggcaaaaauucagccgauucuaga

SEQ ID NO: 58513 - RNA, 56 nt, Pseudomonas aeruginosa PA01
ucuccagcucgcccaguugccgacgcucgccccccggcggcugguagcucaaggga

SEQ ID NO: 58514 - RNA, 69 nt, Pseudomonas aeruginosa PA01
ucggagcugcucggccagccggccggggcgcgcagcauaaccccggccggguuuccuggguaugaacga

SEQ ID NO: 58515 - RNA, 69 nt, Pseudomonas aeruginosa PA01
ucggcaugccggcgaugggcgacuucggaucguucuucgccgccggguugaccacgucguuggcaccga

SEQ ID NO: 58516 - RNA, 75 nt, Pseudomonas aeruginosa PA01
ucggcaccgguuccgagcugcgccagccucugggcaucgcgguggucggcgggcugcuggugagccaggugcuga

SEQ ID NO: 58517 - RNA, 65 nt, Pseudomonas aeruginosa PA01
ucgcuggcguuggccaacuccagcgcaugcgccucgucgcgcgcgcggagcaggccgaccagcgg

SEQ ID NO: 58518 - RNA, 74 nt, Pseudomonas aeruginosa PA01
ucgcguccgcgcugcccgccgggaguuugcuucgagauauugccggccuccccggacaccguggcaaagcgcga

SEQ ID NO: 58519 - RNA, 129 nt, Pseudomonas aeruginosa PA01
ucgcggcugaugcugccgaucuacaacggcuucgccuuccugcggcggaugggccggcugauccgcuaccguuggcccagggucuaggcgccgcaggcgaggccggggucaggcgagcaccgccaccga

SEQ ID NO: 58520 - RNA, 100 nt, Pseudomonas aeruginosa PA01
ucgcgggcgcugcugaucucggcgcucugcgccugcagcgcggcaucgacuucgaugccggccaccggagccggcgcgcggaacagccaggcgcccauga

SEQ ID NO: 58521 - RNA, 55 nt, Pseudomonas aeruginosa PA01
ucgcugaggcugggaaugaacucgcugcccauccgcgaggccaccagcccgguga

SEQ ID NO: 58522 - RNA, 88 nt, Pseudomonas aeruginosa PA01
ucgcgcuucaacgcgcgcagcagccuggccggcaguuuuucgucguugaggaagccgaacagguagcugagcagcagcaugacgccga

SEQ ID NO: 58523 - RNA, 64 nt, Pseudomonas aeruginosa PA01
ucgcgcgcagcgccaaggauggccugggcaaccucgcccgggguaccggccaguugugcggcga

SEQ ID NO: 58524 - RNA, 56 nt, Pseudomonas aeruginosa PA01
ucgcgcgcgcuggugcgacaagggcuucgacgaagccauccgcaaggcgcgcauga

SEQ ID NO: 58525 - RNA, 67 nt, Pseudomonas aeruginosa PA01
ucgaugauguagcccuggccgagguccgggccgacguugccgaccugcgacagggcuaccccgccga

SEQ ID NO: 58526 - RNA, 55 nt, Pseudomonas aeruginosa PA01
ucgaugccgccgaucccccgguuuuccugcauguaggugggcgagcggucgucga

SEQ ID NO: 58527 - RNA, 85 nt, Pseudomonas aeruginosa PA01
ucgaugcugcggcuggccugcgcggccugggccggcuugccgaaggccuggccgugggccggcgaagccugggcgcuggcaccga

SEQ ID NO: 58528 - RNA, 55 nt, Pseudomonas aeruginosa PA01
ucgaggccgcccgcgccggcgaccagggucgcggcuucgccgugguggccgacga

SEQ ID NO: 58529 - RNA, 67 nt, Pseudomonas aeruginosa PA01
ucgaccuggcgcgccugcugccggucgaaagcgaaaccgccaucggcuggcuggugagccugaucga

SEQ ID NO: 58530 - RNA, 73 nt, Pseudomonas aeruginosa PA01
ucgacgacguccggcuuguacugguggugguagcgcggcgcggcgacccauuggccgaccgggcgaccgucga

SEQ ID NO: 58531 - RNA, 79 nt, Pseudomonas aeruginosa PA01
ucgacggugaagagcgccaugcgccaggcggccaaccaguugagccgggagcuggugcguggccugcucggcucguuga

SEQ ID NO: 58532 - RNA, 79 nt, Pseudomonas aeruginosa PA01
ucgacgucuccucgcggcgcaagaucgcgcucuucaccaacgucgaggagcgcgcggugaucgcccuggaagacgucga

SEQ ID NO: 58533 - RNA, 61 nt, Pseudomonas aeruginosa PA01
ucgagccgugcuguccggagcggaucuacgaucuuggcugcggaaccggcaucgccaccga

SEQ ID NO: 58534 - RNA, 113 nt, Pseudomonas aeruginosa PA01
ucgccgcgcagggccgcaaccagcaacggcagcgccuccggcagcuccaggucggccaguucgaucagcgccaggcggcguacgccggggucggcguccuccaggcgcggcga

SEQ ID NO: 58535 - RNA, 61 nt, Pseudomonas aeruginosa PA01
ucgccggcaaagucgagggcuuccugaagguccgcgcgggugccgacgauugagccggcga

SEQ ID NO: 58536 - RNA, 85 nt, Pseudomonas aeruginosa PA01
ucgcccucggccugcgccggccggcuggccagcagcgugguggcgaggcucaggcccaggccgagcgcggcgaccaggcggguga

SEQ ID NO: 58537 - RNA, 64 nt, Pseudomonas aeruginosa PA01
ucgccgcccuuggcguugcgggcgacuuucugcaguugcuucucgcagcugucgaggucggcga

SEQ ID NO: 58538 - RNA, 55 nt, Pseudomonas aeruginosa PA01
ucgccgugcucggcggcgacggcacgcacaaggcaguggccgccgaggucggcga

SEQ ID NO: 58539 - RNA, 77 nt, Pseudomonas aeruginosa PA01
ucgccggggagcugccggcggcggugaagaucgucgaggcgagccggggcgagcugccgcugccggucuugcuggga

SEQ ID NO: 58540 - RNA, 67 nt, Pseudomonas aeruginosa PA01
ucgaugucggcgccgaaguugaugcgggugaaguucaguccguuggcggcgucgguggugagguuga

SEQ ID NO: 58541 - RNA, 81 nt, Pseudomonas aeruginosa PA01
ucgccaccuucguuuccgccggcgacagcaguucggcguugcgccgggcgcuggucugcgcggugcuggcggugguggcga

SEQ ID NO: 58542 - RNA, 84 nt, Pseudomonas aeruginosa PA01
ucgccaggcaggcggcgggcaggccgaacaucaucaccgggaacaucccggccaugaacuggccgcccuucgggucgccggcga

SEQ ID NO: 58543 - RNA, 66 nt, Pseudomonas aeruginosa PA01
ucaucuacaacuucggccaggaccugaucgacgaacacgccaucgaggucagcgccgaacagguga

SEQ ID NO: 58544 - RNA, 61 nt, Pseudomonas aeruginosa PA01
uccaccaucccggcgcacguggcugccaccaacugauucgcgauggcgcgcugcuggugga

SEQ ID NO: 58545 - RNA, 64 nt, Pseudomonas aeruginosa PA01
uccacgcugucgacgacgaagccguagugauccauggucugcaggccguugcuggcagcguggg

SEQ ID NO: 58546 - RNA, 93 nt, Pseudomonas aeruginosa PA01
ucagguuggccacgcuccagccgucgaggaucgcaugguggaagcugaauaccagguccaggccguccucgcggacgaacgcggcgaacagga

SEQ ID NO: 58547 - RNA, 84 nt, Pseudomonas aeruginosa PA01
ucagcacgcgugggcugggcugcaggaagcuguucucguggaccuuguugaugaaguacugcagcaucuucucgcagacgcuga

SEQ ID NO: 58548 - RNA, 87 nt, Pseudomonas aeruginosa PA01
ucagcgccugccgcgccucgucguacuugcgccagcgggucagcggcaccagcaggcgcgaggcgaucugcggguugagugcguuga

SEQ ID NO: 58549 - RNA, 69 nt, Pseudomonas aeruginosa PA01
ucaggagcgagccguggucaucgcgaacagcucacagcggggcuccagccggcgacggcucgcuccuga

SEQ ID NO: 58550 - RNA, 98 nt, Pseudomonas aeruginosa PA01
ucagguacuuguggcuggcgcucggcguggcguugccgggcacgcccuggacccgggcgacgcccggcaggcuaccgccgagcgugcugccgcccuga

SEQ ID NO: 58551 - RNA, 57 nt, Pseudomonas aeruginosa PA01
uccgaggacgggcagaggugguggaugaaaccgcccucgacgccgagguccuugaga

SEQ ID NO: 58552 - RNA, 81 nt, Pseudomonas aeruginosa PA01
uccgccacggccagcggcaacuggcggaggcgguguacaaggccgccuccgccgguuguugccugauggcccaggcgccga

SEQ ID NO: 58553 - RNA, 105 nt, Pseudomonas aeruginosa PA01
uccggcgaucacccgcaguucgccggcccugucgggcaggccgacgcggggaaugucggcauccagcagggucugguagcgcggcggguucaucuugucgcugga

SEQ ID NO: 58554 - RNA, 124 nt, Pseudomonas aeruginosa PA01
uccggcucgccguccagcacgcgggucaggcaggugccgcagaugcccugcucgcaggaggccggcagguccaccccggcuucgcgcagggccgccagcacggucugcccggcggcgacccgga

SEQ ID NO: 58555 - RNA, 93 nt, Pseudomonas aeruginosa PA01
uccgggcaccggaugcccuccucccgccugagggagagggccgggauaucggcagccggcgcaauggggaggaccugcauuccgggcgccgga

SEQ ID NO: 58556 - RNA, 102 nt, Pseudomonas aeruginosa PA01
uccccucagcgccugaucagcacccgucggccuuggugcacgaggcgcaggccaugggucugcgccagcaucgccagggccagcggcaggucgucgacggga

SEQ ID NO: 58557 - RNA, 58 nt, Pseudomonas aeruginosa PA01
uccccugcaggcggaucgcgcugcggcccgcgcgcggcucggauugccggcggacgga

SEQ ID NO: 58558 - RNA, 63 nt, Pseudomonas aeruginosa PA01
ucccgcaccugccacgcagccucggcgcgcuacgcgccgccgaccugggcugcggcaacgggg

SEQ ID NO: 58559 - RNA, 91 nt, Pseudomonas aeruginosa PA01
ucccgccgguuuggcuggucagcggcgaacccgcgcgccugccuucgccguuguucgcggacagcugcgacgagcggagcugguccuggga

SEQ ID NO: 58560 - RNA, 57 nt, Pseudomonas aeruginosa PA01
ucccggcgcgguccaggcgcggcaaacguuucccggccacacaggugcccgccggga

SEQ ID NO: 58561 - RNA, 55 nt, Pseudomonas aeruginosa PA01
uccagcaguucggcggcaacaucaagccugaccaacugccggccgagcuguucga

SEQ ID NO: 58562 - RNA, 65 nt, Pseudomonas aeruginosa PA01
uccagcuacggcggcuggcgcgcccgcgccgacgucggcgaagcgccugggcugccgccacugga

SEQ ID NO: 58563 - RNA, 55 nt, Pseudomonas aeruginosa PA01
uccagguagcgcucgaggaaggccugauagucggcccccgccgcgccggccugga

SEQ ID NO: 58564 - RNA, 71 nt, Pseudomonas aeruginosa PA01
ucgacagccaggcccgucgccgcgccugaggccacuucaguucgccagcagcggcgacggcuggcgcucga

SEQ ID NO: 58565 - RNA, 85 nt, Pseudomonas aeruginosa PA01
ucgacauccggccggucgccggacggaucggcgcggagauucgcggcgugacccuguccggcgaacuggacgccgccaccgucga

SEQ ID NO: 58566 - RNA, 71 nt, Pseudomonas aeruginosa PA01
ucgaaauccgccggucgcucgaagcgcuccgccagcaugcgcggcgcguccaggcgaucgagacggaacga

SEQ ID NO: 58567 - RNA, 61 nt, Pseudomonas aeruginosa PA01
ucgaacgccuggccggcaaccgcugggacggcgaccgcgacagcuggccggaggcgaucga

SEQ ID NO: 58568 - RNA, 82 nt, Pseudomonas aeruginosa PA01
uccuucgccgggucgcccggcucgcugcucggcgccggugcguuguuaccugcgggagccgcaggcgccccauuggcguuga

SEQ ID NO: 58569 - RNA, 58 nt, Pseudomonas aeruginosa PA01
uccucggugcgacggaagcuggcgaaccccagcagccgaucgucgcgcucggccagga

SEQ ID NO: 58570 - RNA, 58 nt, Pseudomonas aeruginosa PA01
uccugcggcgggccgucaugcacccgguacaacgccgggauggcgugcuucugcagga

SEQ ID NO: 58571 - RNA, 58 nt, Pseudomonas aeruginosa PA01
uccugcucggccucgcccgagguguggcgguccaccacccggccgagagcgggcagga

SEQ ID NO: 58572 - RNA, 79 nt, Pseudomonas aeruginosa PA01
uccgcgucgagcggcggccccggcaacagcggcgccgcgccgcugccguugcccgggcugccgccggaguugacccgga

SEQ ID NO: 58573 - RNA, 76 nt, Pseudomonas aeruginosa PA01
uccggccgggaagucuucgucggccucgccgagccgcgcaacagcgcgcucuggccgaugggcaucccgcgccuga

SEQ ID NO: 58574 - RNA, 97 nt, Pseudomonas aeruginosa PA01
uccugcagagcgaugcccagggcgaggccguucgccucguccaggccggcaccggccgacacgccaaccgccaugccuucggggauguugugcagga

SEQ ID NO: 58575 - RNA, 60 nt, Pseudomonas aeruginosa PA01
uagcgggagaacucgcggccgcgcuggagcaggccgaagccuuucggguucuccacgcug

SEQ ID NO: 58576 - RNA, 73 nt, Pseudomonas aeruginosa PA01
uagaaggaaggcagcgaauccccagugaugagcugcaaguucagcuggguuuggcaugcugauacuccuucug

SEQ ID NO: 58577 - RNA, 100 nt, Pseudomonas aeruginosa PA01
ucaccgggcugacacagucuccuucuaucuuggucuacaccagauggcgccgcuggcgucuucgugcaaccgauuggagggagaacgaugagcgcgguga

SEQ ID NO: 58578 - RNA, 81 nt, Pseudomonas aeruginosa PA01
ucaccuccugcuuccugcuguucggcuacuacggcaccaacaacuggaugccguccuaccuggagagcgaguuggggauga

SEQ ID NO: 58579 - RNA, 99 nt, Pseudomonas aeruginosa PA01
ucaccucgaccagcuggccuucgcggcguccgcgccggucauggccggacacccgggccagggcgcggucgccgucgaacaccaggcgcaucugggugg

SEQ ID NO: 58580 - RNA, 123 nt, Pseudomonas aeruginosa PA01
ucaccucgcgggcgcggaugcgcgacggacgucuggagggagucgaggagauccuccacaagggcgaugcggugaccucccugcgcggcgaguucgagcgcaucgucgccgucggcgaaggga

SEQ ID NO: 58581 - RNA, 80 nt, Pseudomonas aeruginosa PA01
ucacaggugcaggccgccggccaucagcgcuaccgcgcgcaggucgcgguaccagcgcucggccggaugcuccuugguga

SEQ ID NO: 58582 - RNA, 70 nt, Pseudomonas aeruginosa PA01
ucaaggcgcaccagcuggcggugauggccggcgugcaggccgccauccgccaccugcuggcgcgcuucga

SEQ ID NO: 58583 - RNA, 130 nt, Pseudomonas aeruginosa PA01
guuucccgcgauuuccaugacaaggcgccggcguuggucgagcuguuccgcaaggucgagauccccuugccgcuguucaacgagcugcucgccgacauggcgcagaaucaucgcgaggucggcgaggugc

SEQ ID NO: 58584 - RNA, 62 nt, Pseudomonas aeruginosa PA01
guuguugcuggccaguuggccggacuugaucgacaacucgccggccuuggccagcggcgcac

SEQ ID NO: 58585 - RNA, 57 nt, Pseudomonas aeruginosa PA01
guuguaggugaccaucgcgcaaucgcccucgcgcagggcgcgcaggccaccuucgac

SEQ ID NO: 58586 - RNA, 85 nt, Pseudomonas aeruginosa PA01
guuggcggugaucagcagguccuucgagcgacccgacugggaaaugcagauggccacgucgcugggcuugagggucaccgccgac

SEQ ID NO: 58587 - RNA, 80 nt, Pseudomonas aeruginosa PA01
guugcgcaccaccgagggcggcgaacaguccugcaagccagggcgucggcugcgucgugacgcccgcggcggugagcagc

SEQ ID NO: 58588 - RNA, 60 nt, Pseudomonas aeruginosa PA01
guugcucggcaugcgcaucaaggucgugagcuucgauacccaugcggaugccguggcggc

SEQ ID NO: 58589 - RNA, 55 nt, Pseudomonas aeruginosa PA01
guugcuugcccuugaucugcuuccacaccuggccgagcagcucgggcggcgcgac

SEQ ID NO: 58590 - RNA, 69 nt, Pseudomonas aeruginosa PA01
uacgagaucgucggcgccaacgaccugguccugaugagcaaccagguacaggugcagaaggucuacgug

SEQ ID NO: 58591 - RNA, 79 nt, Pseudomonas aeruginosa PA01
uaccgccauaucaccguucugcucgaggaggccguuuccgcacuggccccgcgggaggacggcugcuaucuggacggua

SEQ ID NO: 58592 - RNA, 60 nt, Pseudomonas aeruginosa PA01
uaccgcugcgcggcauuuucagggcgcuuuuuucggcgucgccacguugucgcgcaggua

SEQ ID NO: 58593 - RNA, 58 nt, Pseudomonas aeruginosa PA01
gccuuggucgccgcgaucacccggcaguccaccgggaucgacugguucgagccgaggc

SEQ ID NO: 58594 - RNA, 56 nt, Pseudomonas aeruginosa PA01
gcgaagcccagcgccaggcgugccucgucggucucgccggccggcuggguauucgc

SEQ ID NO: 58595 - RNA, 79 nt, Pseudomonas aeruginosa PA01
gcgaagcuugggaucgacguacuccggcugcuccgaggccuuggaguccgggucggccaguuguccuucgaggcucggc

SEQ ID NO: 58596 - RNA, 81 nt, Pseudomonas aeruginosa PA01
gcgaaggacggccgcggguugacggaacgggagcuguucauaggcuuucuggcucuucuucguugaucggcgaguccuggc

SEQ ID NO: 58597 - RNA, 88 nt, Pseudomonas aeruginosa PA01
gccuggcggucgccgcccugguccugcugccguucgccgccguccaggcggaagacacgguggaaccgagcggcuacacgccgauggc

SEQ ID NO: 58598 - RNA, 55 nt, Pseudomonas aeruginosa PA01
gccugggccgcgagccaggacggcgacuccggcacccagggccgcagggccaggc

SEQ ID NO: 58599 - RNA, 55 nt, Pseudomonas aeruginosa PA01
gccugggcgaugcccgcgucgaaacccaucccgacagcuggaucgcgcccagcgc

SEQ ID NO: 58600 - RNA, 77 nt, Pseudomonas aeruginosa PA01
gccuggccggccggcuagucuggcugggauccccgacauggagagcgccaugccacugcccaccgaacucgccaggc

SEQ ID NO: 58601 - RNA, 55 nt, Pseudomonas aeruginosa PA01
gccuggagguccaggcgcuggccgagguguucgagccgcacgcugcccuccaggc

SEQ ID NO: 58602 - RNA, 89 nt, Pseudomonas aeruginosa PA01
gccuggugacccucaccggccugggcggcgagugccuggcccggcggaugcgccugccgcccgggcgggucgaggugaucaaccacggc

SEQ ID NO: 58603 - RNA, 97 nt, Pseudomonas aeruginosa PA01
gccuggugacgauccgcgcaagagcggcgacgggcgccacugcgccuuucucggugcacgccugcccggcucgcgguucagccuggacgucgcccgc

SEQ ID NO: 58604 - RNA, 57 nt, Pseudomonas aeruginosa PA01
gccugucggccuccugggaugccgcgccgaacgcgguggccuacgaggccgaauggc

SEQ ID NO: 58605 - RNA, 88 nt, Pseudomonas aeruginosa PA01
gcgagcugggcgaauucgcuggcggagaagugcggguugcccagcgccaccaggucgauccgcgucucgccggcgcuguccagcucgc

SEQ ID NO: 58606 - RNA, 61 nt, Pseudomonas aeruginosa PA01
gcgaggaaggcggccaggucagcugguacggcaagcccgacccggcggccuuccgcaucgc

SEQ ID NO: 58607 - RNA, 60 nt, Pseudomonas aeruginosa PA01
gcgaggaaguugaggauggcguuggacucccacaggcaacugccguccuccagcuccagc

SEQ ID NO: 58608 - RNA, 67 nt, Pseudomonas aeruginosa PA01
gcgaggcaguucaccuggcgguugcccagcacccuggcguaggcgauggccuugucgacccccucgc

SEQ ID NO: 58609 - RNA, 63 nt, Pseudomonas aeruginosa PA01
gcgaucagcgcgcaggagcccggcaccgggaccacccggauacccagcgccugugccuggcgc

SEQ ID NO: 58610 - RNA, 77 nt, Pseudomonas aeruginosa PA01
gcgagggcgggcgggugcuggaacugaccacccugcguuaccucgacggacagccagugagccugauccgccauugc

SEQ ID NO: 58611 - RNA, 60 nt, Pseudomonas aeruginosa PA01
gcgaguggcgccuggccgcgauccucaccgaccucgccugguugcuccgggccuauucgc

SEQ ID NO: 58612 - RNA, 78 nt, Pseudomonas aeruginosa PA01
gcgaguucggcacgaucaccguggagcggucgcccaucuggaucucgguggcgcgcacguugauccgccggauaucgc

SEQ ID NO: 58613 - RNA, 79 nt, Pseudomonas aeruginosa PA01
gcgacuggaagcgcuggugccgccauccccgcuacuauuucgacgacccggcgaugcgccaccuccaccagcgcuacgc

SEQ ID NO: 58614 - RNA, 81 nt, Pseudomonas aeruginosa PA01
gcgacggggcggcgaggaucugcguggucgccggagccaggcgccggcagaccagcgcaggguccucgucgccgaguucgc

SEQ ID NO: 58615 - RNA, 59 nt, Pseudomonas aeruginosa PA01
gcgacugaguacccguugcggaugaucgaggaacacccgcagcaggcgguacucggcgc

SEQ ID NO: 58616 - RNA, 66 nt, Pseudomonas aeruginosa PA01
gcgaccgcggcgcucggcaucgaccaugccguagaucaggacgaugaagaguucgcugaaggucgc

SEQ ID NO: 58617 - RNA, 61 nt, Pseudomonas aeruginosa PA01
gcgaccgucgucgcugacgcucaggcacagcucgucgcccucgcgcagcagacgcaguugc

SEQ ID NO: 58618 - RNA, 67 nt, Pseudomonas aeruginosa PA01
gcgaccucgacgaugcggcgucggcgcugcaccugccccgcgcccuggucgccgucaucgcgaucgc

SEQ ID NO: 58619 - RNA, 81 nt, Pseudomonas aeruginosa PA01
gcgaccugaagaacuucgacuucaccgucuacgaguggcacaaggacgccacccggaccgaggucaaguaagcaucguugc

SEQ ID NO: 58620 - RNA, 67 nt, Pseudomonas aeruginosa PA01
gcgacgcuggcgagcaacugcucggccggcaucggccugccgagcaggaagccuugcagcgaauugc

SEQ ID NO: 58621 - RNA, 62 nt, Pseudomonas aeruginosa PA01
gcgaaguggcguucggcgaacgcggccuggucggcaccaacccgaaggucgagcgccgccgc

SEQ ID NO: 58622 - RNA, 71 nt, Pseudomonas aeruginosa PA01
gcgaauggggacgcgagagcgagcugggcuacacgcugcagagcggcgccuucaagcgucucaacguccgc

SEQ ID NO: 58623 - RNA, 58 nt, Pseudomonas aeruginosa PA01
gcgccaggccugcucguguuccggggccgccuggcgccagcgcugccaggccuggcgc

SEQ ID NO: 58624 - RNA, 61 nt, Pseudomonas aeruginosa PA01
gcgccaccucgcuguaugccucggccucggccagagacaugaagcucacggcgggcggugc

SEQ ID NO: 58625 - RNA, 57 nt, Pseudomonas aeruginosa PA01
gcgccacggcccccagguacgagcgaugcagcgucucggccgggagcgccuggaugc

SEQ ID NO: 58626 - RNA, 81 nt, Pseudomonas aeruginosa PA01
gcgcauuccggaggcgccggaaugggucgccgggguguucucccaucgcggcguccuggucccggugcucgaccucugcgc

SEQ ID NO: 58627 - RNA, 68 nt, Pseudomonas aeruginosa PA01
gcgcaucgaccugguccuugagacuggccugcuccuucaggcgccgguucuccagcaccaggcggcgc

SEQ ID NO: 58628 - RNA, 116 nt, Pseudomonas aeruginosa PA01
gcgcauguacugcuggcuggcaucgacccacggcugguggucccagcuggccagccguccucgcgccagcgcggcggccaccaggcgucggcggcgcuggcugucgaguacggcgc

SEQ ID NO: 58629 - RNA, 92 nt, Pseudomonas aeruginosa PA01
gcgccgccagacccggggcugaaugacaccgucugcaugggcgcgcagcacagccugcgcgcguagccgguauuccuccggguuggcggugu

SEQ ID NO: 58630 - RNA, 62 nt, Pseudomonas aeruginosa PA01
gcgccgccggccaguucaccggcgcgcagagcaguugcgcgccggacagcgccggcaggcgc

SEQ ID NO: 58631 - RNA, 81 nt, Pseudomonas aeruginosa PA01
gcgccgccggccuggagccggccuggcuguucaacaucgccaccgccgugacccugcuggccggcuccgcgcugguccugc

SEQ ID NO: 58632 - RNA, 62 nt, Pseudomonas aeruginosa PA01
gcgccccucuugcccaucgagguaucgcccuugcucgccuuggacagcgagaggaagggcac

SEQ ID NO: 58633 - RNA, 82 nt, Pseudomonas aeruginosa PA01
gcgcccggggcgucggcugcaucgcacgaccggcgcggaccagcagcgggucgucgagcagcucgcgcaggcgguucagcgc

SEQ ID NO: 58634 - RNA, 55 nt, Pseudomonas aeruginosa PA01
gcgcccugcucgaccaggcgcuugaguucgcggucgagcuggcgcagcagggugc

SEQ ID NO: 58635 - RNA, 80 nt, Pseudomonas aeruginosa PA01
gcgaugcugcaggguaauuuccaccugccccggcgcguacuccgaaaucgccgugcgcgccggcaggcccugggccucgc

SEQ ID NO: 58636 - RNA, 89 nt, Pseudomonas aeruginosa PA01
gcgaugguucauucuuuuucgccggcggcccgccuguccgcacgacggaaccgccgggcgccggcgucagucgggaggaaugccguugc

SEQ ID NO: 58637 - RNA, 97 nt, Pseudomonas aeruginosa PA01
gcgcagcagcgaaccgggcuccagcgccagcaggcguugcaggcguaccagcacgcgccgcauggcgccgaggucggcgcgguuggcggagaggcgc

SEQ ID NO: 58638 - RNA, 62 nt, Pseudomonas aeruginosa PA01
gcgcaggaggaucucgucauggcacucgccgccggcgcacagggccggauccuugcucucgc

SEQ ID NO: 58639 - RNA, 130 nt, Pseudomonas aeruginosa PA01
gcgcaggccgggcagaaccccaagcuuuccgagcuguucuucgaggccgggccgaagcaggugaucgacgagauggaacgccuccucgagcaggcccgccgcagcggcaagcuggcguucccggacgcgc

SEQ ID NO: 58640 - RNA, 70 nt, Pseudomonas aeruginosa PA01
gcgcagggccuggaccggauccucgcgcucgaagucgaucacuucggcgccuugcuggcgggccaugugc

SEQ ID NO: 58641 - RNA, 130 nt, Pseudomonas aeruginosa PA01
gcgcagggcuuccuuggggucgucgagcacacugggaucggccagcuugcgguucuccagcaucucgagcacgccguagggggugaugcuguccaggcuuugcagcggucgccgggggaugccgcugcgc

SEQ ID NO: 58642 - RNA, 77 nt, Pseudomonas aeruginosa PA01
gcgccgccugucggcgcaggcuugccgccuuggccgcgagguccggccaggcgggcuugccggcgaaacgcucgcgc

SEQ ID NO: 58643 - RNA, 57 nt, Pseudomonas aeruginosa PA01
gcgccgcgcgcagcaguggcuggcguucggcgaacgccugcaacugccgugcggcgu

SEQ ID NO: 58644 - RNA, 64 nt, Pseudomonas aeruginosa PA01
gcgcgacagugguagcggcgaccugcgcgacgcccuggugcgccugcugcccucgcugucgcgc

SEQ ID NO: 58645 - RNA, 82 nt, Pseudomonas aeruginosa PA01
gcgcgaccuggugaucgccggccugcugaccuuccucgauccaccgaaggaaaccgccggcccggccaucgccgcguugcgc

SEQ ID NO: 58646 - RNA, 56 nt, Pseudomonas aeruginosa PA01
gcgcgacgcuguugcuggcgggcguggcgaucuucggcagcggcaaggcgucgcgc

SEQ ID NO: 58647 - RNA, 74 nt, Pseudomonas aeruginosa PA01
gcgccugaacaucucccggacgaugucggcacugaugccgucgaugccgucgucgcgggcgaaguucuugucgu

SEQ ID NO: 58648 - RNA, 60 nt, Pseudomonas aeruginosa PA01
gcgccggcuuccucgaacugcucggcgccgaggugccgaccagcgccagcgagccagcgc

SEQ ID NO: 58649 - RNA, 61 nt, Pseudomonas aeruginosa PA01
gcgcgagcgcggcugcuccauccagguaugcccgccgaggaugcugucgacccgcucgcgc

SEQ ID NO: 58650 - RNA, 67 nt, Pseudomonas aeruginosa PA01
gcgcgcaccuggcgccguuccuccccggccacgcucgcggcgagcgcaaggaaggcgcggugagcgc

SEQ ID NO: 58651 - RNA, 58 nt, Pseudomonas aeruginosa PA01
gcgcgcagcgagacgguggugcgcuacgccgggcuuggcgccggcgucuacugcaugc

SEQ ID NO: 58652 - RNA, 97 nt, Pseudomonas aeruginosa PA01
gcgcgcgcaggcaggcgagcaucaggugggcgaaguccuggcagaccccgcgacggcgcuccagcacuucguccagcggcgucgccaccuggguggc

SEQ ID NO: 58653 - RNA, 56 nt, Pseudomonas aeruginosa PA01
gcgccugucgucgcgccgcugagauuucccagcggacccgcgcgcacgacaggcgc

SEQ ID NO: 58654 - RNA, 66 nt, Pseudomonas aeruginosa PA01
gcgcggcagcgagcgccaggaggauaccgaacagguaguccccgcgcggggcgccgcugucgccgu

SEQ ID NO: 58655 - RNA, 68 nt, Pseudomonas aeruginosa PA01
gcgcggccgaaggccagguucuucgccggaaccucaugggugaugguggagccggccgcggucgucgc

SEQ ID NO: 58656 - RNA, 73 nt, Pseudomonas aeruginosa PA01
gcgcggccggcugaagcggcgucagauguuguacgccgagggcggcgacggcaggcgcuccagcaagucgugc

SEQ ID NO: 58657 - RNA, 58 nt, Pseudomonas aeruginosa PA01
gcgcggcgccugccccggaagcccuguacggcuggccgggucgcggcgccacuggcgc

SEQ ID NO: 58658 - RNA, 59 nt, Pseudomonas aeruginosa PA01
gcgcggcggaguguuccgccacgccaaucugcuggugccggccaaggacccgcgcgcgc

SEQ ID NO: 58659 - RNA, 68 nt, Pseudomonas aeruginosa PA01
gcgcggcucuggcuaagcucgaccuucaaacaacgaaaggacgccagcaugguccagagcgccccagc

SEQ ID NO: 58660 - RNA, 101 nt, Pseudomonas aeruginosa PA01
gcgcgggggcgacgaucagacccagcuccggggucucugccugcgggucgaggcggaggaagccaccggacucgacgguguucgaggucagcgccccgcgc

SEQ ID NO: 58661 - RNA, 55 nt, Pseudomonas aeruginosa PA01
gcgcgucgcccugggugacgcguccggaggucaggcugaucacccaggcgugcgc

SEQ ID NO: 58662 - RNA, 69 nt, Pseudomonas aeruginosa PA01
gcgcguccauggcggcgucgagaaagcgauccaccauuacccacgcgaacacuacgccgccuggaucgc

SEQ ID NO: 58663 - RNA, 117 nt, Pseudomonas aeruginosa PA01
gcgcggucaucgcggcugccgacggcgaacugccagguccgugacucguggccguccuccggcuggccggggcgcucgaccuggagguccggcggcggguugcgguugaucgcacgc

SEQ ID NO: 58664 - RNA, 60 nt, Pseudomonas aeruginosa PA01
gcgcgguggucuucaggccggcgacgucggagccggcgccgaccucggagacgccgaugc

SEQ ID NO: 58665 - RNA, 78 nt, Pseudomonas aeruginosa PA01
gcgcuucaugccgaugcugaugaccgccgccggcaccgugaaggccgcccgcgugcugauccucggcgccggcgucgc

SEQ ID NO: 58666 - RNA, 70 nt, Pseudomonas aeruginosa PA01
gcgcuucuacaagcgacgccggcucagcccggacaccgucggggaaaagcuggugcgcgccguggagcgc

SEQ ID NO: 58667 - RNA, 76 nt, Pseudomonas aeruginosa PA01
gcgcuugccggccugacugucugccgggcaacagcgggacaacagggcuguccggcagaagacaggccgguuccgc

SEQ ID NO: 58668 - RNA, 121 nt, Pseudomonas aeruginosa PA01
gcgcuugguacgcauggccuugagggucgccggcgagcaguuggcgauguccaccugcgaaccuucgugcucgaucagcagcuugccgcggcugaccuuguucaggccguugaugcagcgc

SEQ ID NO: 58669 - RNA, 63 nt, Pseudomonas aeruginosa PA01
gcggaaauggccaagggagccgggccuacgaucguaggcgagccuccccgggccauuuccugc

SEQ ID NO: 58670 - RNA, 63 nt, Pseudomonas aeruginosa PA01
gcggaagcgcugcgggucguccgugcccugcaccucaaaggcacggauuuccagcgcauccgc

SEQ ID NO: 58671 - RNA, 56 nt, Pseudomonas aeruginosa PA01
gcggaauggcugucgccccaacugaccagcagcggucguucggcagccaguuccgc

SEQ ID NO: 58672 - RNA, 58 nt, Pseudomonas aeruginosa PA01
gcggacgccuggcccguccuggcggacgugaaugccgcggaugggguggggcguccgc

SEQ ID NO: 58673 - RNA, 96 nt, Pseudomonas aeruginosa PA01
gcgcggaccuggccggcguggcgaccuucaagcgucggcucaaggccgcccaggccgagcuggagcgugaguucgccgcgugcugggacgaugcgc

SEQ ID NO: 58674 - RNA, 71 nt, Pseudomonas aeruginosa PA01
gcgcggagaggccgucggcgaccacgauggccaggucgaucugcccgucguagccggcggcguguucgcgc

SEQ ID NO: 58675 - RNA, 77 nt, Pseudomonas aeruginosa PA01
gcgcgggucgaggcgccacucggcagccugccgcugucugcgccgagcagcggggugcugguggcccuggaaguggc

SEQ ID NO: 58676 - RNA, 56 nt, Pseudomonas aeruginosa PA01
gcgcgugcauuggcuggccggcgaccagaagcugcuggcccaggacuaugccgcgc

SEQ ID NO: 58677 - RNA, 75 nt, Pseudomonas aeruginosa PA01
gcgcguuccuccugcugguggugcuuuaccuggcgcuguggcgcccggccgagcgccaucugcagucggcgcggc

SEQ ID NO: 58678 - RNA, 76 nt, Pseudomonas aeruginosa PA01
gcgcucgacccgcaggccgaccaguucgcugaugucgaagaaacggcgccaguugaugucguccgccgcggugcgc

SEQ ID NO: 58679 - RNA, 106 nt, Pseudomonas aeruginosa PA01
gcgcucggcgaugauccagccgaugcguacgccgggcgagauggucuuggagaaacucgagcaguagaucacccggccgucgcggucgugggacuugagcgagcgc

SEQ ID NO: 58680 - RNA, 74 nt, Pseudomonas aeruginosa PA01
gcgcucgggauugcggcggguaagcgcaagcgguuauucggccaaccucccgcgacuauccgccgugccggcgc

SEQ ID NO: 58681 - RNA, 58 nt, Pseudomonas aeruginosa PA01
gcgcucucgcuggucuuucaggcguucuccggaugccgucucagccagcgcagggcgu

SEQ ID NO: 58682 - RNA, 67 nt, Pseudomonas aeruginosa PA01
gcgcugcaucaaccugcuggagaacccgcaccagggccagauccuggucuccggcgaagagcugcgc

SEQ ID NO: 58683 - RNA, 78 nt, Pseudomonas aeruginosa PA01
gcgcugcuccaucgcggucaccccgcccugcuccuucagccauucgaagaccaggccggacagguaccaggaguaagu

SEQ ID NO: 58684 - RNA, 96 nt, Pseudomonas aeruginosa PA01
gcgcuggucgucagcaaccauggcggacgccaacuggacggcgcgcccucgaccaucagcgcgcugccggcgaucgucgaggcggugggcgagcgc

SEQ ID NO: 58685 - RNA, 59 nt, Pseudomonas aeruginosa PA01
gcggcggccguucauguaccagaugguguucuucaacucguguaccgaagggucgcugu

SEQ ID NO: 58686 - RNA, 57 nt, Pseudomonas aeruginosa PA01
gcggcggcgucucgugggccugguaaugaccggccagcgcccucggccggccgucgc

SEQ ID NO: 58687 - RNA, 63 nt, Pseudomonas aeruginosa PA01
gcggcggcuugcuggcgaucccggcgcuaggggugaucuucggucucgaccagcaacuggcgc

SEQ ID NO: 58688 - RNA, 107 nt, Pseudomonas aeruginosa PA01
gcggcucgagagcgguccgcugguggcgcgccuggaccgucggcgccccgaucucuaccugcugccgcuggaccaggggcgccccaccggcgaccuguucacccugc

SEQ ID NO: 58689 - RNA, 59 nt, Pseudomonas aeruginosa PA01
gcggcugguugaucucgugggcgaugcccgaggccaguucgccgagagugaccagccgc

SEQ ID NO: 58690 - RNA, 67 nt, Pseudomonas aeruginosa PA01
gcggcguguccuccgguggggcgguggcggcgaugcugcgccugucccgcgaacuggagaaugccgu

SEQ ID NO: 58691 - RNA, 59 nt, Pseudomonas aeruginosa PA01
gcggcgccgcccugcugcuggcggccaagguggcacgccagagcccgguggcgauccgc

SEQ ID NO: 58692 - RNA, 56 nt, Pseudomonas aeruginosa PA01
gcggcgcgaccagggcgaucuggccgucgcggaugcccagcgcguggucgcgcagc

SEQ ID NO: 58693 - RNA, 83 nt, Pseudomonas aeruginosa PA01
gcggcgcaucagcaccaggcugggcuccauggcgucgagguucaucucgacccggcuuuccgccucggugcgaaugccgccgu

SEQ ID NO: 58694 - RNA, 93 nt, Pseudomonas aeruginosa PA01
gcggcgagcgagcuguucgagcgcucgguccuguugcuggcccaggaguucuucuacaccgaguacgacuggcgcaucggcgugcucgaccgc

SEQ ID NO: 58695 - RNA, 58 nt, Pseudomonas aeruginosa PA01
gcggcgauagcggccuugaucucgucgcgcuuggcggcgaucggcaggcugucgucgu

SEQ ID NO: 58696 - RNA, 77 nt, Pseudomonas aeruginosa PA01
gcggccuguucgauggcgugguggaccaccgggauaccgugggugaggaugccgccgccgaccaugaacaucgccgc

SEQ ID NO: 58697 - RNA, 78 nt, Pseudomonas aeruginosa PA01
gcggcgaaccggagccguccgguaccacgucuuccggcagcaccaccggcaacuggucggccggcaccgggacgucgc

SEQ ID NO: 58698 - RNA, 79 nt, Pseudomonas aeruginosa PA01
gcggccggccaggucggcuucaccucggugccggcgacggucgccagccugaccagccuggccaccuuccugaugccgc

SEQ ID NO: 58699 - RNA, 90 nt, Pseudomonas aeruginosa PA01
gcggccagcgccgggaucagcucaggcgaugccugcuugcugcgcacguagucggagaguaccuggcgcggaucggccggcgccgguugc

SEQ ID NO: 58700 - RNA, 62 nt, Pseudomonas aeruginosa PA01
gcggaugguccgggugcggucguugagcacgucuaccucgauggucgccgggagcaucucgc

SEQ ID NO: 58701 - RNA, 66 nt, Pseudomonas aeruginosa PA01
gcggaucugacggcgcgucccugcccgccccauccacgggagcgggcagggccuugucagccccgc

SEQ ID NO: 58702 - RNA, 61 nt, Pseudomonas aeruginosa PA01
gcggcagaucggcgagcgcggcgaccuggacaaggucagcuucggccuggucgguuuccgc

SEQ ID NO: 58703 - RNA, 80 nt, Pseudomonas aeruginosa PA01
gcggcagcggcaggcuggcguugcccuugccggugaagccgauguucaucgggaaggcgucggcggccuggagcauccgc

SEQ ID NO: 58704 - RNA, 57 nt, Pseudomonas aeruginosa PA01
gcgggcgguucuucgucgcccccaugggggaggucggcgaaguccugcacgaaccgc

SEQ ID NO: 58705 - RNA, 58 nt, Pseudomonas aeruginosa PA01
gcgggcgccguggaucagccgcgagagcaggucgcggcccaguucgucggugccgagc

SEQ ID NO: 58706 - RNA, 62 nt, Pseudomonas aeruginosa PA01
gcgggcaggcucauggcagcucggcgaaguagcagcguugcgcagccuugagcauguagcgc

SEQ ID NO: 58707 - RNA, 83 nt, Pseudomonas aeruginosa PA01
gcgggccaggcgcacgccgucggcgucguuuuccgccagguauuccgcggugccggcgaccugcgcgugcaguucggcuccgc

SEQ ID NO: 58708 - RNA, 64 nt, Pseudomonas aeruginosa PA01
gcggcuugccgguuuccucgccgaucacucgggccagcucgucggcgcgggacuugagggucgc

SEQ ID NO: 58709 - RNA, 62 nt, Pseudomonas aeruginosa PA01
gcgggaagucgagggucuuggaguaggcggagaagccggcgacgaucaucuucggcuuaugc

SEQ ID NO: 58710 - RNA, 95 nt, Pseudomonas aeruginosa PA01
gcgggaugaaccagcgcgccagcaggcugccggguacgccgaggacgaacggggccucggcggucugccggcgcagcucggcacagacgccacgc

SEQ ID NO: 58711 - RNA, 75 nt, Pseudomonas aeruginosa PA01
gcgggggcgaagcgcgcgagaaagcggucgguggccgagggcgcgguaccggcgaguuccgcgcguuccuugcgc

SEQ ID NO: 58712 - RNA, 68 nt, Pseudomonas aeruginosa PA01
gcggggucggcagggccacccagaagguacccuugcggucgcccuggagguuguccggcaagcccggc

SEQ ID NO: 58713 - RNA, 74 nt, Pseudomonas aeruginosa PA01
gcgggucuucuccgucgagcggauccaggcguugcaggacaaggccaaggagcgucuugcggagcuaaaccugc

SEQ ID NO: 58714 - RNA, 68 nt, Pseudomonas aeruginosa PA01
gcgggugaagaccggcacgucggcgcccaggcgcaggcccagggcggcgaugcgguccucgucccagc

SEQ ID NO: 58715 - RNA, 55 nt, Pseudomonas aeruginosa PA01
gcggugacgaucuccuugauuccggugucgcgggucaggccgaagaucgcgccgc

SEQ ID NO: 58716 - RNA, 77 nt, Pseudomonas aeruginosa PA01
gcgguggagucgaugccgcugggugccgcuucgguguucgccgccgagggccugauggcgacgcuguauuccaucgc

SEQ ID NO: 58717 - RNA, 64 nt, Pseudomonas aeruginosa PA01
gcggugaugcccuugcgcgccagccacugccgcaccacccgcugcgcggccugggcgucgucgc

SEQ ID NO: 58718 - RNA, 126 nt, Pseudomonas aeruginosa PA01
gcggugccgaucacguucaggccggucaguugccgggccaguuggaccaggaucgaaccgaccccgccggcggcaccgaccaccagcaggcucuggcccuggucggccuugccuucggcgaucugc

SEQ ID NO: 58719 - RNA, 126 nt, Pseudomonas aeruginosa PA01
gcgucacguaacgcgacgcugguaugggugaaugccgccggauugaugaugaugaaguccacgccuucgucgcgcgcggcauggauccggucgaucaguucguauucggcguugcucugcagaugc

SEQ ID NO: 58720 - RNA, 58 nt, Pseudomonas aeruginosa PA01
gcgucccggcgagcgcgccgagcgggccggcuggcgcgccgaccagucgcgaggacgc

SEQ ID NO: 58721 - RNA, 76 nt, Pseudomonas aeruginosa PA01
gcgucgaccugcuccacggcggcauagagcggauccagggccgcgcccuggggcgccugcugcuacaggucggcgc

SEQ ID NO: 58722 - RNA, 58 nt, Pseudomonas aeruginosa PA01
gcgucgaugauggcgucggacagcggcgugucgaugcugccggcggcgucguugucgu

SEQ ID NO: 58723 - RNA, 76 nt, Pseudomonas aeruginosa PA01
gcgucgccgccgggcgcccggacgugcagcgcgggcugcugcgcuggauguuccuggugcucgaggucggccacgc

SEQ ID NO: 58724 - RNA, 58 nt, Pseudomonas aeruginosa PA01
gcgucggccaggaggugguacgccagacccuggagcggaucgagcgacuggccgaggc

SEQ ID NO: 58725 - RNA, 130 nt, Pseudomonas aeruginosa PA01
gcgucuucagcgagccgcgucggcuggucucgccggucaccgacgagcgccucgacuacaccgcgcgcaucgaccugcguggccugccagccgaccagucgaucuucuaccgggugcgcuucgaggaugc

SEQ ID NO: 58726 - RNA, 75 nt, Pseudomonas aeruginosa PA01
gcgugcgugguggccgggcagaugcuggucucggcgcucugcgaccaguucggcugggccgguuucccggugcgc

SEQ ID NO: 58727 - RNA, 83 nt, Pseudomonas aeruginosa PA01
gcguggaguacgccgcgguaccgcgccuggccagugccgaauauuaccuggagcagggcugcgugccuggcggcacccugcgc

SEQ ID NO: 58728 - RNA, 74 nt, Pseudomonas aeruginosa PA01
gcgugggaucuucuucgccagcguggcgccggcgcugcuggugcuggcccuggcgaugcgcuggcugcccaggc

SEQ ID NO: 58729 - RNA, 89 nt, Pseudomonas aeruginosa PA01
gcuggcggccaacugggugauggucgagcugggcagccugcucaacaaggacggccuggagaucgagcaguccccgguguccgccgagc

SEQ ID NO: 58730 - RNA, 76 nt, Pseudomonas aeruginosa PA01
gcuggcccgcgaacauggacuggaaccggcgcagauggcacuggccuacgucacuucgcggccguucgugaccagc

SEQ ID NO: 58731 - RNA, 56 nt, Pseudomonas aeruginosa PA01
gcuggccagcguguuccccgaccagguggcgugccuggagaauaucgucggcgagc

SEQ ID NO: 58732 - RNA, 62 nt, Pseudomonas aeruginosa PA01
gcuggccgcgcuggccgaggcagggcucaagggcgaccgccaggccuaugccgcguaccagc

SEQ ID NO: 58733 - RNA, 55 nt, Pseudomonas aeruginosa PA01
gcuggccgggguggcggugccgagggcgccguggaagcucgccacgccggccagc

SEQ ID NO: 58734 - RNA, 72 nt, Pseudomonas aeruginosa PA01
gcuggcgcuggcugcgaucggcuggcuggcgucgaguugcagaugcuggcgcuggucgcugccgacgagggc

SEQ ID NO: 58735 - RNA, 62 nt, Pseudomonas aeruginosa PA01
gcugggagaacucguagacgcugcccggcaccucaagggccgcggccugcaauucuuccagc

SEQ ID NO: 58736 - RNA, 85 nt, Pseudomonas aeruginosa PA01
gcuggucaguuucgagaugccuucgguguaggccuugucgaacugcagcggaaugccgaaggcgaucgaggcgaggauggucagc

SEQ ID NO: 58737 - RNA, 88 nt, Pseudomonas aeruginosa PA01
gcuggugguguccggugggcgcaguccgguggccuuccucgaagccuugagcgaggagccgcuggacuggucgcggaucacagucagc

SEQ ID NO: 58738 - RNA, 70 nt, Pseudomonas aeruginosa PA01
gcuggugcccaguuccgccgccgcgcgcgccagguugccggugcgcaugaaggcgaggaagguuuccagc

SEQ ID NO: 58739 - RNA, 67 nt, Pseudomonas aeruginosa PA01
gcuggguuccgccgccggcguccaggccgccgacaacuucgucggccugaccuggggcgagaccagc

SEQ ID NO: 58740 - RNA, 84 nt, Pseudomonas aeruginosa PA01
gcugcugcgcgugcugcaggaacgcgagguggugcggcucgguucgcgccggccgauccccaucgacgugcggcugguggcggc

SEQ ID NO: 58741 - RNA, 77 nt, Pseudomonas aeruginosa PA01
gcugcuggcggaacaccaggauguggugcucgcgcagcgccugcuugagcgccaggaccugcuccggcgccagcggc

SEQ ID NO: 58742 - RNA, 68 nt, Pseudomonas aeruginosa PA01
gcugcuggcgguauucggccaccagcggcaccaguugccggccaaggcugacguacagcgccagcagc

SEQ ID NO: 58743 - RNA, 86 nt, Pseudomonas aeruginosa PA01
gcugcucgcgccgcgccucgaccucgcgcugcacgucgcgauacggcgugaccgcggagcccggucgggcgcugcgcuccagcggc

SEQ ID NO: 58744 - RNA, 64 nt, Pseudomonas aeruginosa PA01
gcuggaacuggaggacauccagguccucgaacagggcgacggccuggucuacuucagccgcagc

SEQ ID NO: 58745 - RNA, 128 nt, Pseudomonas aeruginosa PA01
gcuggaucgcgcugguguugaggcugaucuggaucgccgcgguguccgggcugaguuccaccagguauuucuggaucgccggccccggcgccauguugaacacgcaccagaacaccaccgcgcccagc

SEQ ID NO: 58746 - RNA, 65 nt, Pseudomonas aeruginosa PA01
gcuggagcgggccuuagcccaggugcuucuuguccagcucgaucgccuggucgaggguuuccagc

SEQ ID NO: 58747 - RNA, 71 nt, Pseudomonas aeruginosa PA01
gcuggaggcgcgcaucgcucgacuggagcgacagauucaggcucacguacguggcgaugcccgcauccagc

SEQ ID NO: 58748 - RNA, 72 nt, Pseudomonas aeruginosa PA01
gcugcacagcgagcgggaguugcucgcccgcggccaggagcugggcgaggaggguuuccgcgugcugguggc

SEQ ID NO: 58749 - RNA, 103 nt, Pseudomonas aeruginosa PA01
gcugaugaccgcccugguggcgucccucgguuucgugccgauggcccuggccaccggcaccggcgccgaggugcagcggccgcuggcgacgguggugaucggc

SEQ ID NO: 58750 - RNA, 61 nt, Pseudomonas aeruginosa PA01
gcugccgcugcuggccaguucggagcgcgucacucugcgcuucgggcugucgguguugcgc

SEQ ID NO: 58751 - RNA, 66 nt, Pseudomonas aeruginosa PA01
gcugccggugcucuaucgcuggacccacgggcgcgacgccggaccgcgcgaggagacgccggcggc

SEQ ID NO: 58752 - RNA, 61 nt, Pseudomonas aeruginosa PA01
gcugccgucgcgcggcucccagccggcguuccaguagggcgcccgcucgcucggcggcagc

SEQ ID NO: 58753 - RNA, 91 nt, Pseudomonas aeruginosa PA01
gcugcgcacauagcgggccagcucgcgcagggcauggccgacauccuccaggcucgccuugcccggcuuggcgcuacgaccgcugugcagc

SEQ ID NO: 58754 - RNA, 85 nt, Pseudomonas aeruginosa PA01
gcugcgcgccgcuucgucgaggccggguagcgccucgcuggacagcaccaguucgccgacccggcgcuggcgcucggcacgcagc

SEQ ID NO: 58755 - RNA, 106 nt, Pseudomonas aeruginosa PA01
gcugcgcgcgccaucgagcgccagcgcaccgccaugggccgccagcaggucguccggcacgcgguucuccaggcgauugcgcugguagucgaugccgccgcgcagu

SEQ ID NO: 58756 - RNA, 72 nt, Pseudomonas aeruginosa PA01
gcugcggcgcaggaugggcguggacgcgcuguccggguucgucuucgagaugcucuuccugcugccgcuggc

SEQ ID NO: 58757 - RNA, 59 nt, Pseudomonas aeruginosa PA01
gcugcggcuauugcggcucagcgcggugaccagcgcgccgaaaucgcgacugccgaggc

SEQ ID NO: 58758 - RNA, 55 nt, Pseudomonas aeruginosa PA01
gcuccauuuauccaggggcagauaugaaaauaucugcccuuguucuaaugguagc

SEQ ID NO: 58759 - RNA, 57 nt, Pseudomonas aeruginosa PA01
gcucccguccacgcggcaacggcgcccucggagccguuccagccgccggcggaaagc

SEQ ID NO: 58760 - RNA, 65 nt, Pseudomonas aeruginosa PA01
gcuccggccgccccggcuuccucauccgugccgcccuggcgaccauggggucggggcuguggggc

SEQ ID NO: 58761 - RNA, 62 nt, Pseudomonas aeruginosa PA01
gcuccggccuucugaaggcucuucuugaaucagaaaaaccuuacgccagaaguagugggggc

SEQ ID NO: 58762 - RNA, 76 nt, Pseudomonas aeruginosa PA01
gcuccggggacaggcgccgcuugauguucugcacguugugcaggaucgcgccgagcggguuguugaucucgugggc

SEQ ID NO: 58763 - RNA, 112 nt, Pseudomonas aeruginosa PA01
gcucgccggguugcucaucgcggugcuguucagcuaccgccgcaagcgcgucuacgacuugcagcggaucgagcaggccgaacgcgucgaugucagcuacaacccgaagagc

SEQ ID NO: 58764 - RNA, 100 nt, Pseudomonas aeruginosa PA01
gcucgccuggcgcuaucgaggcuccgagcuggaguugcggauuggcaccgacagugucgacccgcgucucuaugugaggcguuucauggagucggggagu

SEQ ID NO: 58765 - RNA, 60 nt, Pseudomonas aeruginosa PA01
gcucgccuggcugcgcagcgagaugcccggccguccgggaaugcgcggcagccaggcggc

SEQ ID NO: 58766 - RNA, 128 nt, Pseudomonas aeruginosa PA01
gcucgcggcgcuugaucgaggcgauguccucggcggcgggcagcgcauccgacagcgccggguccuuggccgcuuucagcgggucguagccgagcggguccugggcaucgcugaaggugccgcucugc

SEQ ID NO: 58767 - RNA, 68 nt, Pseudomonas aeruginosa PA01
gcucgcugggguccagccagaggccgcggaagaggaacaccgcgacgaucaggaagauccccagcggc

SEQ ID NO: 58768 - RNA, 85 nt, Pseudomonas aeruginosa PA01
gcucggcggucggucggacggcggcaggccggucauggcacugucgccaccgguggccggguugccgcugacgccgaucaccagc

SEQ ID NO: 58769 - RNA, 55 nt, Pseudomonas aeruginosa PA01
gcucgggucgagggccuugagacgcuccagcagggucaggccgucgaugccgggc

SEQ ID NO: 58770 - RNA, 57 nt, Pseudomonas aeruginosa PA01
gcucggguguccugcaagcagaucacgucggcauucugugcuugcagccaacugagc

SEQ ID NO: 58771 - RNA, 103 nt, Pseudomonas aeruginosa PA01
gcugacgauccgccccggcagcacguagcgcccgcgcaacugggaaagcuccuggucgcucaguucggcgggggcgaagaggucgcuggcgggggcgggcagc

SEQ ID NO: 58772 - RNA, 83 nt, Pseudomonas aeruginosa PA01
gcugacugccaagcgccugcgccugucggccggcgccucgguacgcgcggugccgcugucggcgcagaagcgcgguugaaagc

SEQ ID NO: 58773 - RNA, 65 nt, Pseudomonas aeruginosa PA01
gcugagccaggcgcgcaucgccaugaacgacaaggaauacgaccaggccaagcgccuggcgcagc

SEQ ID NO: 58774 - RNA, 64 nt, Pseudomonas aeruginosa PA01
gcugagcgccugcucgcggcugaucaauugggccucgaucacguccggcaggcgcucgaucugc

SEQ ID NO: 58775 - RNA, 103 nt, Pseudomonas aeruginosa PA01
gcucucgaccuccaggcgcagucgcggacgcucuucggugaagcgcgucagcaccggcaucagcacuucgccggcgaggucuuccggcacgccgaggcgcagc

SEQ ID NO: 58776 - RNA, 88 nt, Pseudomonas aeruginosa PA01
gcucuguucgaagucggcgaggaugcgcaggucggcgugcucgcgcagcgggcugucgcugcugcacaucuguccgacuuuccagcgc

SEQ ID NO: 58777 - RNA, 67 nt, Pseudomonas aeruginosa PA01
gcucuugccggccacaugcucggggguaccccgcggguaccgacgguagguggacggcacgcugagc

SEQ ID NO: 58778 - RNA, 113 nt, Pseudomonas aeruginosa PA01
gcucaaguucgaguccggcgcgcaccgcgugcagcgggugccggaaaccgaaucccagggccggauccacacuuccgccugcaccgucgcggugcugccggagccggacgagc

SEQ ID NO: 58779 - RNA, 129 nt, Pseudomonas aeruginosa PA01
gcucaggucgauggccucgccgagguccucgcggccgugcccuucgagcugcaccagcacgcuggcgucgccgcuccagcggcaggucgcgcgggccagggcggucagcagcaggucguugaccugggu

SEQ ID NO: 58780 - RNA, 66 nt, Pseudomonas aeruginosa PA01
gcucagaccacuccggccgccgcacgccaggccugguuauggcucuggguguacugcuggaugagc

SEQ ID NO: 58781 - RNA, 105 nt, Pseudomonas aeruginosa PA01
gcucaugcgcuugccgucgcgcaggaacaguucgacgcccagguccuccucgagcuggcggauccgcguggugacguucgacugcgcucgcugcaaccgcugagc

SEQ ID NO: 58782 - RNA, 73 nt, Pseudomonas aeruginosa PA01
gcucaugugcuggccgauuucgccgagcgccgcgagcugaucgccaagcgcguggccgaacuggccgccgagc

SEQ ID NO: 58783 - RNA, 76 nt, Pseudomonas aeruginosa PA01
gcuacuucagccagauggucggccucacggugcagaacuucgucagcgcggcggucggccucugcgugcugguggc

SEQ ID NO: 58784 - RNA, 67 nt, Pseudomonas aeruginosa PA01
gcguugauggcggccagggccaguggcgugccuaucccggccaggcgcugguugaccgccucgaugu

SEQ ID NO: 58785 - RNA, 56 nt, Pseudomonas aeruginosa PA01
ggacgcgcagugccggcaccgccaccccgccgcucuggaugccggcgcuguagucc

SEQ ID NO: 58786 - RNA, 55 nt, Pseudomonas aeruginosa PA01
ggacaaggccuugcgcaaccgcggcguacaagucgcggugggcugcaucuuuucc

SEQ ID NO: 58787 - RNA, 72 nt, Pseudomonas aeruginosa PA01
ggaagauccagcccggucuugcgccguuucauuucgucgaugcguugucgcagcgccaggcgcugggcuucc

SEQ ID NO: 58788 - RNA, 61 nt, Pseudomonas aeruginosa PA01
ggaaaucuggucgaugaauucgcggaugucggcauccuugagguugaucguccagugcgcc

SEQ ID NO: 58789 - RNA, 130 nt, Pseudomonas aeruginosa PA01
ggaacuggugcaccgggccaucgacagcggcgugcugcggcugggccugccgcugccgcucgccgaggaggcucgcggcagucucggcuaggggcgccgucgcugcuguccggcgcuucacugccagccc

SEQ ID NO: 58790 - RNA, 75 nt, Pseudomonas aeruginosa PA01
ggaacagcgccgcguccagcuccaggcgccguccgaggaacucccacuuggugcccagcucguaggugcuguucu

SEQ ID NO: 58791 - RNA, 85 nt, Pseudomonas aeruginosa PA01
ggagaacaacugcaccaguugcggcuucaacgcguugcgguuggccgccucgacgaagccgcgcagguagucgccguugaucucc

SEQ ID NO: 58792 - RNA, 89 nt, Pseudomonas aeruginosa PA01
ggacacccaccggcaggccgucgacgaagccggcgggcauggacagccccggcaggccggcgagguuggcggugaugguguagaugucu

SEQ ID NO: 58793 - RNA, 61 nt, Pseudomonas aeruginosa PA01
ggacaguugccaaucccgcagcgaggucgcuuccacugcgcugaagggcuccgcgcugucc

SEQ ID NO: 58794 - RNA, 98 nt, Pseudomonas aeruginosa PA01
ggacguuguugaugaacgacuucggaucguucagcaccuugcggucgaccugguaggcccagaacugcuuggagaucucgaaguucucguugaucgcc

SEQ ID NO: 58795 - RNA, 73 nt, Pseudomonas aeruginosa PA01
ggacgucggcgggugcucggagcgcuugccgcuggaccacagcggcgaccagccuucgcgcuugccggugacc

SEQ ID NO: 58796 - RNA, 72 nt, Pseudomonas aeruginosa PA01
ggacgugccgcgcgaggaacgcggcggacgcgggcacacgccgcgccagccgaccgacucgccgcucuaccc

SEQ ID NO: 58797 - RNA, 89 nt, Pseudomonas aeruginosa PA01
ggacguggugaagcgcaacaucggugccaugggcgggcgcaucgacaucgacucggcgcccggcaugggcacucgcaucggcauccgcc

SEQ ID NO: 58798 - RNA, 113 nt, Pseudomonas aeruginosa PA01
gcugugcccgucgaacucggagacccagauggccagcgcguccgggucaugggcguggguuugcgccacggucucgacgcuggcguucgggaucgccugggcggcgggccagc

SEQ ID NO: 58799 - RNA, 116 nt, Pseudomonas aeruginosa PA01
gcugguuccccgcucagggcgccgacagcggacgauaggcgagcaucagcgggacgucggcagcgugcgcgaccuguaccaguucgcuggccaggcgcccaccgggaaacaccagc

SEQ ID NO: 58800 - RNA, 73 nt, Pseudomonas aeruginosa PA01
gcuguucgacuucggccgccgcagcgccgcccugcgcaacgcccagcaguugcugcuggcggccaacgccagc

SEQ ID NO: 58801 - RNA, 94 nt, Pseudomonas aeruginosa PA01
gcuguugcgcguauugcaggagcgcgagguggagcgggucggugcgcgcaaaccgaucaaccuggauauccgcgugcuugccacgaccaaccgc

SEQ ID NO: 58802 - RNA, 94 nt, Pseudomonas aeruginosa PA01
gcuguugcuguggagcgcgccgaaucccugggucggccuggccggcgcggcccucaccggcuucggcuucucccugguguucccggcguucggc

SEQ ID NO: 58803 - RNA, 63 nt, Pseudomonas aeruginosa PA01
gcuguugucgagcagcacgccgacacugcggcaggcaugcgcggcgaucugcucggcgagggc

SEQ ID NO: 58804 - RNA, 56 nt, Pseudomonas aeruginosa PA01
gcuuccagccggccgcuuccagcgccugccagucgcgcgcggccgguucgggaagu

SEQ ID NO: 58805 - RNA, 69 nt, Pseudomonas aeruginosa PA01
gcuucgcgaucggcggguugccagcucagcagguagcuggcgagcagggcaccgccgaccagcaggagc

SEQ ID NO: 58806 - RNA, 55 nt, Pseudomonas aeruginosa PA01
gcuucgcgucccgcgcgcgguccgcagccgagcgccgagcgcaaggggcgcgagc

SEQ ID NO: 58807 - RNA, 111 nt, Pseudomonas aeruginosa PA01
gcuuccgcagguugagcgccccccuggacgcgccguugcgcugguucgccgguaaccacgacgaacgcgagccgaugcaacgggcgaccgagggcagcgaccuguuggagc

SEQ ID NO: 58808 - RNA, 56 nt, Pseudomonas aeruginosa PA01
gcuuccgggcaauucggcgaggcggacaucaagucgcgcuucgucacccuggaggc

SEQ ID NO: 58809 - RNA, 61 nt, Pseudomonas aeruginosa PA01
gcuucaagcccgccggcgaccagccggaagccauccggcagauggucgaggggcuggaggc

SEQ ID NO: 58810 - RNA, 76 nt, Pseudomonas aeruginosa PA01
gcuugccgacaggcgcgcgccgcuaggguguccgcaucgccgcaccgcccuggcggggccgcgacuucccggcugc

SEQ ID NO: 58811 - RNA, 59 nt, Pseudomonas aeruginosa PA01
gcuuggcgcacugcgcgaauucgcccggcugcagggccugucgcugcaacacgucaagc

SEQ ID NO: 58812 - RNA, 78 nt, Pseudomonas aeruginosa PA01
gcuugaggauuuccugguuguagcgagcgcccaugccgaguuccugcugcucgcucaucaucacgaaaucgcucuugc

SEQ ID NO: 58813 - RNA, 58 nt, Pseudomonas aeruginosa PA01
gcuucuguggcagcgccgugggcaggccgcggccgcuccaggcagugaccacaagggc

SEQ ID NO: 58814 - RNA, 55 nt, Pseudomonas aeruginosa PA01
gcuucuucgagcagggcaagggcgccaaugucaccgugccguucaaggaagaggc

SEQ ID NO: 58815 - RNA, 86 nt, Pseudomonas aeruginosa PA01
gcuugucgcuggcgacgccgaggcgacgcagggucacguacuuggcgauggcguaguccucgcagucggcggcgcccuugaccagc

SEQ ID NO: 58816 - RNA, 109 nt, Pseudomonas aeruginosa PA01
gcuugugcagggucucgcugucgcagucccagccgcgcgccgcgcauuccugcuggauugccggagucuucgccugguugggaauggcgaagccggccaggguguaggc

SEQ ID NO: 58817 - RNA, 61 nt, Pseudomonas aeruginosa PA01
ggaaagcuggaacggauagugcucggcgaaaccggcgaggugacacuucuccagcauuucc

SEQ ID NO: 58818 - RNA, 81 nt, Pseudomonas aeruginosa PA01
gccggugguccuggccugcgggucgagcugggcgcugaccaggaagcgcgcgucggccggcaggcucucggcgaccucggu

SEQ ID NO: 58819 - RNA, 64 nt, Pseudomonas aeruginosa PA01
gccgguguucgacaggacucgcugcaagccuuccaguacgcuguagcgacccuugagcgccggc

SEQ ID NO: 58820 - RNA, 65 nt, Pseudomonas aeruginosa PA01
gccguagcgcauuuccugggccuugacgaacugacuguugaaggugcgcgggaaggcgccgcggu

SEQ ID NO: 58821 - RNA, 69 nt, Pseudomonas aeruginosa PA01
gccguaggccaggaucgagagcaggaugugggccaggaugcccggcuguucguugaucggcucgacggu

SEQ ID NO: 58822 - RNA, 88 nt, Pseudomonas aeruginosa PA01
gccggucaaccugaucaugggcugcuacggcaucggcguaucccgcguggucgccgccgccaucgagcagaaccaugacgagcgcggc

SEQ ID NO: 58823 - RNA, 91 nt, Pseudomonas aeruginosa PA01
gccggucagcagcggcgcauagcuccagccgaagccuucgaguucgcgcuggggccccggcgguggagugaugccgcugcgguagaucggc

SEQ ID NO: 58824 - RNA, 72 nt, Pseudomonas aeruginosa PA01
gccggucgcgcucgcgguaagguaugcccgcuuuuccuuccguugcgguguauuccguggagugucgccggc

SEQ ID NO: 58825 - RNA, 56 nt, Pseudomonas aeruginosa PA01
gccgggagugaagaaggcgaugaugaacagcgccggcuuccaccugcucgaccggc

SEQ ID NO: 58826 - RNA, 89 nt, Pseudomonas aeruginosa PA01
gccggggaaagcaagagccugcugcgccgggcccugcgcgggcaccugccgcaggcgauccuggagcggcgcaagagcgguuucccggc

SEQ ID NO: 58827 - RNA, 56 nt, Pseudomonas aeruginosa PA01
gccggggccggcgaucuugcuggcgaggauccagucggcgcggucgccgcugcggc

SEQ ID NO: 58828 - RNA, 84 nt, Pseudomonas aeruginosa PA01
gccggggucuucgagcgcagcaaugccaccgugcaaccagccuugcuggugcaaggcaugcgccgcguggcgcuggcccucggc

SEQ ID NO: 58829 - RNA, 57 nt, Pseudomonas aeruginosa PA01
gccggcggcggacgccagcagcgugucgugcagcgggaugcugaauucgccgccggc

SEQ ID NO: 58830 - RNA, 78 nt, Pseudomonas aeruginosa PA01
gccggcgaucaccaggcucgcggaugcgcgcaggucggucgccaugaccggagcgcccuugagcuuggguacgccggu

SEQ ID NO: 58831 - RNA, 73 nt, Pseudomonas aeruginosa PA01
gccggcgccgccucgggcagccccuugagcgcguuguagaaacgguccagggccgccuuggccucgcgcaggu

SEQ ID NO: 58832 - RNA, 69 nt, Pseudomonas aeruginosa PA01
gccggacgccccggagcuggucaaccaggacccgcucggcgaggccugguucuuccgcuuccguccggc

SEQ ID NO: 58833 - RNA, 69 nt, Pseudomonas aeruginosa PA01
gccggacggaagcggaagaaccaggccucgccgagcggguccugguugaccagcuccggggcguccggc

SEQ ID NO: 58834 - RNA, 65 nt, Pseudomonas aeruginosa PA01
gccggagaucaccgagccguccgaggggaucagcaccucgaagcgcuccgggucgaucugcuggc

SEQ ID NO: 58835 - RNA, 58 nt, Pseudomonas aeruginosa PA01
gccggagcugccggccgaccugucggcgaugcccuacgucggcugggagcguucgcgc

SEQ ID NO: 58836 - RNA, 63 nt, Pseudomonas aeruginosa PA01
gccggccgagaaggucgcguagucggccugcggauccuugaacgcgaagccuucgcgggcggc

SEQ ID NO: 58837 - RNA, 74 nt, Pseudomonas aeruginosa PA01
gccggcgaagggcgggaacugcgcgcgcagcgggugggccucgaacuggcgcagcaguuccucgccgagcuggc

SEQ ID NO: 58838 - RNA, 86 nt, Pseudomonas aeruginosa PA01
gccggcgagcaggcgcaguuggacgcccgcuuccccggccguagccguuucgacacgcgcgcgccgacuggcgccuggacuucggc

SEQ ID NO: 58839 - RNA, 57 nt, Pseudomonas aeruginosa PA01
gccguuccagcggcggaugagcgcagcucgauuccuccgccgcagccgcuggacggc

SEQ ID NO: 58840 - RNA, 91 nt, Pseudomonas aeruginosa PA01
gccguugcugcugcagguguuccagggcuucggcgagucgcaguuguuccucgcgcagcgaauccaggggcgccuggagcgucucgacggc

SEQ ID NO: 58841 - RNA, 57 nt, Pseudomonas aeruginosa PA01
gccguuucgcuggucggcccgucggcgaaaaacagcaaccagaccagcgccagcggc

SEQ ID NO: 58842 - RNA, 74 nt, Pseudomonas aeruginosa PA01
gccgugguagccgguggggaggauguccgaaaggcaggucaggucgcggaucuucuccaucgccgcuucgcggu

SEQ ID NO: 58843 - RNA, 59 nt, Pseudomonas aeruginosa PA01
gccgucucgcuggaacgggguuccgacaaccuucggcuccgccgccucagcggggcggu

SEQ ID NO: 58844 - RNA, 56 nt, Pseudomonas aeruginosa PA01
gccgucgauccucgccgcguucuacaccgaggacgccggccuggagggcgcucggc

SEQ ID NO: 58845 - RNA, 68 nt, Pseudomonas aeruginosa PA01
gccucgucgcgcaggacgguaaccgaaagcgucacgcugagcggcgagccguccuugcgcagauaggu

SEQ ID NO: 58846 - RNA, 82 nt, Pseudomonas aeruginosa PA01
gccugacccgcgccgaggagaucgccgccagcgaucgcgcggcggcggcgcggcguacgcuggaggcgaugcucgggcaggc

SEQ ID NO: 58847 - RNA, 126 nt, Pseudomonas aeruginosa PA01
gccugaccgggcaucgcgcggaggccguggcguucgguaccgaggcgccguacuuccagcgccugggcagcgagacccugguccucggugccggcgacaucgccugugcccaccagcccgacgagc

SEQ ID NO: 58848 - RNA, 72 nt, Pseudomonas aeruginosa PA01
gccuauucgcugaucgccgacagcuucccgcgcgagcgucgggcgacggcgaucagcgucuacucgaugggc

SEQ ID NO: 58849 - RNA, 57 nt, Pseudomonas aeruginosa PA01
gccugagcgagacucaggacacugcgccgaggucguugucgcggguuuccuucaggc

SEQ ID NO: 58850 - RNA, 86 nt, Pseudomonas aeruginosa PA01
gccugauccaccggcccgccgggugcggccuggacgauggcgaaguugaucagcaggaugcccagcagggucggcaggaucagcgc

SEQ ID NO: 58851 - RNA, 77 nt, Pseudomonas aeruginosa PA01
gccugcgcaucggccuggucgaagcccuggcgccgcacggccuggccgagcgcuucgcccaugucggcgcgcaacgc

SEQ ID NO: 58852 - RNA, 55 nt, Pseudomonas aeruginosa PA01
gccugcgucgugcccuggcccgccauccgcucggccaggccugcuacccgcuggc

SEQ ID NO: 58853 - RNA, 83 nt, Pseudomonas aeruginosa PA01
gccugcucgaacgcggcuucgucuuugccaucgcccauguccguggcggcggcgaacugggcgaagccugguaccgggccggc

SEQ ID NO: 58854 - RNA, 111 nt, Pseudomonas aeruginosa PA01
gccgccaucccagggcacgccgaucaggccgaccugcagcgccgccgggucggugaacgccggcaggcgcaugaaggucgggauaccggcgaagcggggaaucucggcggc

SEQ ID NO: 58855 - RNA, 102 nt, Pseudomonas aeruginosa PA01
gccgcaucucggcuccuccugugggcuccgacuaucacucgaugaugaugaaauccuugaggugcucuucggauaucuccaggcccaggccgggcuuguggu

SEQ ID NO: 58856 - RNA, 67 nt, Pseudomonas aeruginosa PA01
gccgccacccugagcgcgcugaucgcccgcagcuucggcaccgaggucagccugcucggccuggcgc

SEQ ID NO: 58857 - RNA, 81 nt, Pseudomonas aeruginosa PA01
gccgaugccuucgaucacaccggaauacaucggcgaacgaucgagauuggcggcgaugaucucguggguccgggcguuggu

SEQ ID NO: 58858 - RNA, 88 nt, Pseudomonas aeruginosa PA01
gccgcaacaggucgucgagcgccgcuucgucaggaucggcgaacgccgcgaaggccuggcgguggugcucgaaggccuugagggcggc

SEQ ID NO: 58859 - RNA, 120 nt, Pseudomonas aeruginosa PA01
gccgccgcggugggcgauuucugcgccgagcggcgggugcugcuggaccuugugguggaggaccaggaggucgggcucaagcgcaugcgcgcgggcgaaguggccggcugcgucugcggu

SEQ ID NO: 58860 - RNA, 76 nt, Pseudomonas aeruginosa PA01
gccgccggacguaccagccggcggccuguuccccgccuucgccgggaucgccaccggccugguagcgcuggccggc

SEQ ID NO: 58861 - RNA, 111 nt, Pseudomonas aeruginosa PA01
gccgccgagauuccccgcuucgccgguaucccgaccuucaugcgccugccggcguucaccgacccggcggcgcugcaggucggccugaucggcgugcccugggauggcggc

SEQ ID NO: 58862 - RNA, 60 nt, Pseudomonas aeruginosa PA01
gccgccgaggcugaugcgcugcgggcugaacagcacguccucgcuccucugcccgguggc

SEQ ID NO: 58863 - RNA, 93 nt, Pseudomonas aeruginosa PA01
gccgccgaugaccacgaaggccaucugcauggugaacgggaucaggcuccagaaaccgucgccgaaggcuuucgccguggcggucgguccggc

SEQ ID NO: 58864 - RNA, 56 nt, Pseudomonas aeruginosa PA01
gccgcgggcacucauguuggccugguugaagaagauccggccgaagugcucgcggu

SEQ ID NO: 58865 - RNA, 57 nt, Pseudomonas aeruginosa PA01
gccgcgcaguucuccgccuuucucuuccaugagcugggcgaccugaacugggccggc

SEQ ID NO: 58866 - RNA, 107 nt, Pseudomonas aeruginosa PA01
gccgcucugcaggucgagguugccggcccggcuguccaggcggccgcccugguuguccagcgcgccgccgauacgcagccgguugucgcccugggccuggagcgugc

SEQ ID NO: 58867 - RNA, 58 nt, Pseudomonas aeruginosa PA01
gccgcuggccaggcccucgccgagggcccuggccgucugcaggaagccuggcagcagc

SEQ ID NO: 58868 - RNA, 55 nt, Pseudomonas aeruginosa PA01
gccgcggucggccagcaggcgcagccagcgcaguuucagccagccgaucugcggc

SEQ ID NO: 58869 - RNA, 121 nt, Pseudomonas aeruginosa PA01
gccgcucgacgccgacugccaggcccugaugaugcgccgccuggaagccgccggcuucgcccuggagccgaugcgcaucgaggagguggacaacuucugggcacggcgcggcggcgacggc

SEQ ID NO: 58870 - RNA, 64 nt, Pseudomonas aeruginosa PA01
gcccugcgccugggccuucuucugcaggccggcgaggcaggaagggaagcucgaggcgucgggu

SEQ ID NO: 58871 - RNA, 74 nt, Pseudomonas aeruginosa PA01
gccgagcauguugcugucuucgccggugcucaucggccgccccagcaccagguaggacagcgccugcuccuggc

SEQ ID NO: 58872 - RNA, 58 nt, Pseudomonas aeruginosa PA01
gccgagcgagaacguuccgccgaccuacuucucuucggucagcccggaacuguuuggc

SEQ ID NO: 58873 - RNA, 84 nt, Pseudomonas aeruginosa PA01
gccgagcgccgcgagcaggccgcugacugcgccgagcagggcgaacucgacccgccggguacguugcagcaacucgcgcucggc

SEQ ID NO: 58874 - RNA, 57 nt, Pseudomonas aeruginosa PA01
gccgagcgcgcccucgaacugaugugcaagcgcgcggucagccguaccgcguucggc

SEQ ID NO: 58875 - RNA, 57 nt, Pseudomonas aeruginosa PA01
gccgaggaauuuccccgcgaacucuaucucaaggccggcgcggccgggauccucggc

SEQ ID NO: 58876 - RNA, 89 nt, Pseudomonas aeruginosa PA01
gccgaggccgacggcgagcgccaggugauccucggcagcaccccgcugcucgacgccgacgccgcgcucgccgcgcucgacgccgcggu

SEQ ID NO: 58877 - RNA, 98 nt, Pseudomonas aeruginosa PA01
gccgaggcgcauacugugcaacugcgucugcugcgcgagggcgacgagcugugccugagcgucagcgacgacggucgcggguucgauguugccacggu

SEQ ID NO: 58878 - RNA, 57 nt, Pseudomonas aeruginosa PA01
gcccuggaagaccugccggagaagcucgaaggcuucgacacgguauucuccaugggc

SEQ ID NO: 58879 - RNA, 63 nt, Pseudomonas aeruginosa PA01
gcccuggaccuggcggugaagagccgcgagcgcgugcgcugaggcguuccgccggcccggggc

SEQ ID NO: 58880 - RNA, 88 nt, Pseudomonas aeruginosa PA01
gcccuggcgauugcccuccaggaacgggcccaggcgcagggcgcccuggaagugcuguuccuggacaagcagggcgacuaccgcuggc

SEQ ID NO: 58881 - RNA, 97 nt, Pseudomonas aeruginosa PA01
gcccuggugguugcgcgcacccucccgcugcucgaacucgcagacgauguccaguuccuccagcgcggcgaugguguccugugcgguacgccggggc

SEQ ID NO: 58882 - RNA, 63 nt, Pseudomonas aeruginosa PA01
gcccuuggccagguugaucuguccggcgucgcugaagauguacucgcgggcaagcuuggcggc

SEQ ID NO: 58883 - RNA, 62 nt, Pseudomonas aeruginosa PA01
gccgaagcugguggcgcggcugcaggaguugccgcagcucgccgacgucgccagcgacuggc

SEQ ID NO: 58884 - RNA, 76 nt, Pseudomonas aeruginosa PA01
gccgaaggugaugcgcuccagggcggcgcggacgaaguccgguaccggcacgaagcucuugcggaucgccuucggc

SEQ ID NO: 58885 - RNA, 78 nt, Pseudomonas aeruginosa PA01
gccgacagaagaaccggcggguggaagucugggucuacugaacgcuguagcacuuuguaaccucgccguuuugccggc

SEQ ID NO: 58886 - RNA, 88 nt, Pseudomonas aeruginosa PA01
gccgacagcgccuaugaacggcugcuggagcgccugggccaggccaucgcccacggccuggcccagcucgggcacgcugcgcuguggc

SEQ ID NO: 58887 - RNA, 56 nt, Pseudomonas aeruginosa PA01
gccgaccaggccggugaguccgcccugggguaccagggcgcgucccgccuggcggc

SEQ ID NO: 58888 - RNA, 62 nt, Pseudomonas aeruginosa PA01
gccgaccggcucgucuuccgggcccugccgccaacggcuuccggauagcgcgucgacgcggc

SEQ ID NO: 58889 - RNA, 81 nt, Pseudomonas aeruginosa PA01
gcccugaucgccgguugaugcggguuccgguaggggaagcgccgugcuuccucugucgguucgcauaggucggcgcguggc

SEQ ID NO: 58890 - RNA, 60 nt, Pseudomonas aeruginosa PA01
gcccauggcgaaagcgccgccgaucagccaggagagcgccucgcggccuuucgccagggu

SEQ ID NO: 58891 - RNA, 65 nt, Pseudomonas aeruginosa PA01
gccccagguguucggcaucggccgccagcgccccgaggccguggccgggaucgagcaacuggcgc

SEQ ID NO: 58892 - RNA, 58 nt, Pseudomonas aeruginosa PA01
gcccaggcgccguugcgcgaggcuuuccagcuggagagcgaggccaggcgccuggagc

SEQ ID NO: 58893 - RNA, 79 nt, Pseudomonas aeruginosa PA01
gcccaggcgggcagucucagugucugcggugcucggcgaagcgcuccagggcuucgcggcugaggcgcucgaccugggc

SEQ ID NO: 58894 - RNA, 75 nt, Pseudomonas aeruginosa PA01
gcccagggcgaggaauucgccuugcugcgcgacgcccuggccgggcgcccggaagcgcggguccucgaccugggc

SEQ ID NO: 58895 - RNA, 106 nt, Pseudomonas aeruginosa PA01
gcccccugguuggcgcugaccaggaccaguugcgcggccucgccgacaugcgcgagacagcagacgacgagcgcgagcagcgccuggaaagcccgacgggcggggc

SEQ ID NO: 58896 - RNA, 93 nt, Pseudomonas aeruginosa PA01
gccccggcggacagccugccggcccugguggcggcggucgagcaggccggcuaccagguuccggcgcgcagccuggaacuguccaucgagggc

SEQ ID NO: 58897 - RNA, 89 nt, Pseudomonas aeruginosa PA01
gccccgggagagcggccgccggcgcuggagcgccucggcgaacugaucgccgaggaguuccggcucugagccgcuacagcgccgggcgc

SEQ ID NO: 58898 - RNA, 59 nt, Pseudomonas aeruginosa PA01
gccccgguguagggaucaauccagcgcgacucgccgcggcgcugucccggcggcggggu

SEQ ID NO: 58899 - RNA, 100 nt, Pseudomonas aeruginosa PA01
gcccaguugguaaucguagacgcgcacgucaccguccuucggccgcaccaggaugcgguugccggagacgauggcgacguucugcucgcugcccgacggc

SEQ ID NO: 58900 - RNA, 68 nt, Pseudomonas aeruginosa PA01
gcccgaauggccgcggauacccgucgaaggcgccagugcccgcgacuggaauccgcgaaccuucuggu

SEQ ID NO: 58901 - RNA, 86 nt, Pseudomonas aeruginosa PA01
gcccgagcgggcguuugcggcgaccugccggcguugugaagccgccggcaaaaacgccgccuuuuuccgcgaaacgccgcucaggc

SEQ ID NO: 58902 - RNA, 60 nt, Pseudomonas aeruginosa PA01
gcccggcgcaggguauggcgguucaccgcgaagcgcugggccagcuggaucucgccgggc

SEQ ID NO: 58903 - RNA, 56 nt, Pseudomonas aeruginosa PA01
gcccggcuucccggcggaaagucucgagguccugggcuucgccgugauagccgggc

SEQ ID NO: 58904 - RNA, 61 nt, Pseudomonas aeruginosa PA01
gcccgguaccgcgcuugaucacguccugcagcaugcuggucaugauauaggcgguacgggc

SEQ ID NO: 58905 - RNA, 103 nt, Pseudomonas aeruginosa PA01
gcccgccaucguucgccgcagacccugguggugcucggucgcgacaucgggcggcccggugagcgccugcugcgcaccacccugggcgagcugcgugcggagc

SEQ ID NO: 58906 - RNA, 55 nt, Pseudomonas aeruginosa PA01
gcccucgccgacgaccugcgccgagcgccggguagcuucgccgagcgagcacggc

SEQ ID NO: 58907 - RNA, 61 nt, Pseudomonas aeruginosa PA01
gccaucgucauccucggugccggccggcagaccaacgacccggccuggggcgacgaugcgc

SEQ ID NO: 58908 - RNA, 82 nt, Pseudomonas aeruginosa PA01
gccaguucgucgacccguccgggcagcucgccggaaagcuggccgagcagguguugcaggcgggucugguugacguacuggu

SEQ ID NO: 58909 - RNA, 69 nt, Pseudomonas aeruginosa PA01
gccauccagcgccagcggaauccccgagacgcgacucaccgcgcucuggaacgcggcguugcgacuggc

SEQ ID NO: 58910 - RNA, 129 nt, Pseudomonas aeruginosa PA01
gccaucgagcaucagguugcggucgagcgccucgaagcguacgccgccggcgcugcugaucgcuucguccagcggacgcgggcgcagcagcgucagcggcaggcgcuugaucgccgccgccaggcgggc

SEQ ID NO: 58911 - RNA, 75 nt, Pseudomonas aeruginosa PA01
gccauuucgccgaagccggcgccaugcgucauggccugacgccacgcgaacuggacgccggccagucggcgcggc

SEQ ID NO: 58912 - RNA, 66 nt, Pseudomonas aeruginosa PA01
gcccagcuggaugcucgcgcucagcucgugcaacacacuucgcucgcgauugccguccagccaggc

SEQ ID NO: 58913 - RNA, 78 nt, Pseudomonas aeruginosa PA01
gcccagcagcuuccagccggcggaauacuucggguccugcucuacgcagcgcuggagguguuccgccgcgcguucggc

SEQ ID NO: 58914 - RNA, 66 nt, Pseudomonas aeruginosa PA01
gcccagcgcgcacgcacacccagcucgucgaucaacgcucgguagguggcguugucgcgcuggcgc

SEQ ID NO: 58915 - RNA, 105 nt, Pseudomonas aeruginosa PA01
gccagcgagccgccagcggcguccgccccgcucugcgccaacggccacccgcugcaacccggcgaccugaugugccuggagugcggcgccgcgccggccgaaggc

SEQ ID NO: 58916 - RNA, 130 nt, Pseudomonas aeruginosa PA01
gccaggaugcguuccagcucgccgcgcaucagcgccugccgcgccucgucguacuugcgccagcgggucagcggcaccagcaggcgcgaggcgaucugcggguugagugcguugagcacgaucaccuggu

SEQ ID NO: 58917 - RNA, 76 nt, Pseudomonas aeruginosa PA01
gccaggcaaugggcgagccacucgccgaggaacagguugagcugguucuucucgucgggcuggugcaucgccuggu

SEQ ID NO: 58918 - RNA, 69 nt, Pseudomonas aeruginosa PA01
gccaggccgcacgccuggucgggcucggcgccagcgccgaagaccugacccaggccugcggucugucgc

SEQ ID NO: 58919 - RNA, 56 nt, Pseudomonas aeruginosa PA01
gccaggcgccgggccgcuccgccgaccugucgcggucggucggcgaggcgccuggc

SEQ ID NO: 58920 - RNA, 80 nt, Pseudomonas aeruginosa PA01
gccaggcgcgagagggcgcggcgaaugauggugcggcugacaccgaauaucucgccgagcgccuccucgcucagcuuggu

SEQ ID NO: 58921 - RNA, 56 nt, Pseudomonas aeruginosa PA01
gccagggcgcguaacugguggucgaacuccugcuguucggugaguacgcgcuuggc

SEQ ID NO: 58922 - RNA, 97 nt, Pseudomonas aeruginosa PA01
gccaccgcugggcggugggcgagagcggcuucgacccggcgggggcgaccuacgcgccggccgccgaggucgccaauggcuaccgccgagccauggc

SEQ ID NO: 58923 - RNA, 88 nt, Pseudomonas aeruginosa PA01
gccacgcggcggaggugaucaagcgccugcgcgccuuccugcgcaagggccagcggcgccugcaggcgcucgaccucaaccagguggc

SEQ ID NO: 58924 - RNA, 108 nt, Pseudomonas aeruginosa PA01
gccacggccuggcugaaccuguuccaguuggcggcguugcagcccggcgagaaagugcugcugcacgccggcgccagcggcgucgguucggccggcauccaauugugc

SEQ ID NO: 58925 - RNA, 57 nt, Pseudomonas aeruginosa PA01
gccacggcggcggccagcgcguuccgccaauggguggaagcgcgguucgccgcuggc

SEQ ID NO: 58926 - RNA, 60 nt, Pseudomonas aeruginosa PA01
gcaugccguucgccgcguacuuggucaguucggcgcugcgcaggcccaugaacagcaugc

SEQ ID NO: 58927 - RNA, 130 nt, Pseudomonas aeruginosa PA01
gcauggcggcgucgagacuggucagccgguguucgcgaauggccuugcggaucugcccgugguugaggucgcugcagccgcagauggccuucucgcucuucggcuugacgucggcggcgccgccgacggu

SEQ ID NO: 58928 - RNA, 76 nt, Pseudomonas aeruginosa PA01
gcauucaccgccgcccucuugcggcgaaccccucuuaugucaggguucacaaggccgccgagggcuggaagaaugc

SEQ ID NO: 58929 - RNA, 77 nt, Pseudomonas aeruginosa PA01
gcaggugguuuccgcagucuucagcaugccgcgucccuggcagcaggggcacggcucgcagaggaucugcaccaggc

SEQ ID NO: 58930 - RNA, 80 nt, Pseudomonas aeruginosa PA01
gcagggccucguccagcgccaggccgaacucuccggccagggccucgagacucugccggugcaacuggucgaggugcugc

SEQ ID NO: 58931 - RNA, 80 nt, Pseudomonas aeruginosa PA01
gcagguacuccagggccuggcgcccgucguugagcgcggucauuuccacgccgaccgccuccaggcaacggauuaccugc

SEQ ID NO: 58932 - RNA, 63 nt, Pseudomonas aeruginosa PA01
gcaggucgcgcacguucuggcuguugaugaagaccaucccggccucgaugccgcgugccaggc

SEQ ID NO: 58933 - RNA, 95 nt, Pseudomonas aeruginosa PA01
gcaggucgcgucgaaaaccuucaggccgcgccccucggcuuccuugcggaccgccugggaaacgccgugggcgcugaagaugacgaugacguugu

SEQ ID NO: 58934 - RNA, 78 nt, Pseudomonas aeruginosa PA01
gcauccgucgcccguccugccucguccgcgcagcgcucgccgcuguccauccgggcgaggcgggcgugcccaccaugc

SEQ ID NO: 58935 - RNA, 97 nt, Pseudomonas aeruginosa PA01
gcaucgaccugucggugagcuggcaggcgcucugggaugaucacgcaguaguggcgcggguggucuucgagcguccgcagcucaacuucgucgaugc

SEQ ID NO: 58936 - RNA, 57 nt, Pseudomonas aeruginosa PA01
gcaucgcgccggguuucaucgucgccaggcgcugcgcgucgaugagguggcgggugu

SEQ ID NO: 58937 - RNA, 84 nt, Pseudomonas aeruginosa PA01
gcaucgguuccaaagcaggaugccugaagaccucguccgguuggccuacccagcggcacagaggccgggcccugagcccgaugc

SEQ ID NO: 58938 - RNA, 130 nt, Pseudomonas aeruginosa PA01
gcaucagucauccucccggcggacguucagugaccaguccugcccaucggugcgcaggucgaacaggaucggccggcagcacaccgggcaguccucguaguacugcuggucgccggcgcucaggucgagc

SEQ ID NO: 58939 - RNA, 99 nt, Pseudomonas aeruginosa PA01
gcaucaaggucccggacggcccgcugaccucgcgccugcagcaccugaaggaaggcgacgagcugauggucagccgcaagccgaccggcacccuggugc

SEQ ID NO: 58940 - RNA, 95 nt, Pseudomonas aeruginosa PA01
gaugaaacguuugagcggagcucccaggcgucgccuggcgcaugggggcgccgggcgauagccggggagauggacccugaaugauagguuuuauc

SEQ ID NO: 58941 - RNA, 78 nt, Pseudomonas aeruginosa PA01
gaugaggaugcccggggacaugucguccagcccgcugagcacgguggagccgguggcggugauucccgacaugcuuuc

SEQ ID NO: 58942 - RNA, 73 nt, Pseudomonas aeruginosa PA01
gauccggcgauccgcgucaucgugcucaccggcgacucgcgcugcuuugcagcuggcgccgaucuccgcgauc

SEQ ID NO: 58943 - RNA, 80 nt, Pseudomonas aeruginosa PA01
gauccuuuccaauauugacacugaacgagccggaguuauugccauagguuccgggcacgucguuguagauaagagugauu

SEQ ID NO: 58944 - RNA, 106 nt, Pseudomonas aeruginosa PA01
gaucaccauggucgagaucgacggcaccguggucgacaugugcaaggaguuccugcccaaccacucccagggcgccuucgacgacccgcggcugaaccuggugauc

SEQ ID NO: 58945 - RNA, 85 nt, Pseudomonas aeruginosa PA01
gaucgccuggaauuccuugucccgcgccugcuucgccgagccgccggcggagucgcccucgaccaggaacaguuccgcgcgcauc

SEQ ID NO: 58946 - RNA, 91 nt, Pseudomonas aeruginosa PA01
gaucgccuuccgcccgcgcugcuccuaucgccugcugcuggaguccugguucgccagcgcgcgagugagcaugggccgggugauggagauc

SEQ ID NO: 58947 - RNA, 60 nt, Pseudomonas aeruginosa PA01
gaucgcgugguggacaucgacggcggccuccugcuguccggcgacacccucuacgugguc

SEQ ID NO: 58948 - RNA, 91 nt, Pseudomonas aeruginosa PA01
gaucgggccgagcaggccggcuaccucgaaggcggugggaacgaucgccgcgccgaccuugccgagcgccggcaugcguucguagacgauc

SEQ ID NO: 58949 - RNA, 55 nt, Pseudomonas aeruginosa PA01
gaucucgaggaugcggccggagaagauguucuucuugcccuucuucucgacgguc

SEQ ID NO: 58950 - RNA, 57 nt, Pseudomonas aeruginosa PA01
gaucucgccguugcgcuggccuucgcuccaaccgcgggaaaucagcucggugagguu

SEQ ID NO: 58951 - RNA, 81 nt, Pseudomonas aeruginosa PA01
gaucucggugauggagccguccucgccggccuggucuucgguggcaaggucgagcaggcgcagggcggcuucgccgaaguc

SEQ ID NO: 58952 - RNA, 81 nt, Pseudomonas aeruginosa PA01
gauaccguuccaggccgagcgcgaagccuuguccuaugagauagaggugaauggccagcgcgucgaacuggccgcgguauc

SEQ ID NO: 58953 - RNA, 94 nt, Pseudomonas aeruginosa PA01
gauccaggugcgcguggguauggaugaugcugaccaccugcaggccgaggcggucgaggcgcugcaggaucaguucguggucgccgcccggauc

SEQ ID NO: 58954 - RNA, 103 nt, Pseudomonas aeruginosa PA01
gaucccaccaucgccgcacgacagcgcuggaugggcgugcucgcccgcgcccgucgcgaggagcuggacgcccaugcggacgcccugcgcgaugccgacuauc

SEQ ID NO: 58955 - RNA, 126 nt, Pseudomonas aeruginosa PA01
gauccccuggccgaccgugccagcaccgugugcgccgggguuuccggcgugcuuuucgccaucgaacggaugcgcuacgcgcagccgggacucuggcuggccaagguggccggucgucaaccgauc

SEQ ID NO: 58956 - RNA, 61 nt, Pseudomonas aeruginosa PA01
gaucagcgccacgguggcgccggugauugaggcggugcgggugccgccgucggccuggauc

SEQ ID NO: 58957 - RNA, 61 nt, Pseudomonas aeruginosa PA01
gaucagcucggcgccgcguagcgugccgucgucguccaggcgcgccggcgccgggcugauc

SEQ ID NO: 58958 - RNA, 93 nt, Pseudomonas aeruginosa PA01
gaucaggcucacguagggcaccuggaacucguggcgcaggcuguccucgacgguacugaccacgucuuccaggcugguggcgucgagcagguc

SEQ ID NO: 58959 - RNA, 77 nt, Pseudomonas aeruginosa PA01
gaggcuguccggggucggguuggcugggguguuccggcucaugccauccugcucgaucacggccugguucauguuuc

SEQ ID NO: 58960 - RNA, 61 nt, Pseudomonas aeruginosa PA01
gaggcuugcgcugggcccagccgcucucacggaaggcgcggugggcgccggccauggccuc

SEQ ID NO: 58961 - RNA, 93 nt, Pseudomonas aeruginosa PA01
gaggucgaggucgcagggcagcucgaggucuucgucgcuggccagcacgcgggugaugugcgccuugagcugcucgagggaagucucgaucuc

SEQ ID NO: 58962 - RNA, 69 nt, Pseudomonas aeruginosa PA01
gaggccccgggccggcggaacgccucagcgcacgcgcucgcggcucuucaccgccagguccagggcuuu

SEQ ID NO: 58963 - RNA, 58 nt, Pseudomonas aeruginosa PA01
gagcucgcucuggaugcgcguccgcacaugcuggaagaccgccaucagcgcgggcauc

SEQ ID NO: 58964 - RNA, 129 nt, Pseudomonas aeruginosa PA01
gaggacgaccaguucgccguccagccaacugcgcugcagaccgagcccggccaaggccuucuccagguguggcaggcguucgguccagucauggccguugcgggucagcaggcgcacguggccgucuuc

SEQ ID NO: 58965 - RNA, 129 nt, Pseudomonas aeruginosa PA01
gagcuggcgcggcacccggcgcuggaugauggucggguagucgucgggguucuucaaugcgucgauaagccccucgcggaucucggcgaugcgcuccggguuguugccgauggagucgccgucggcguc

SEQ ID NO: 58966 - RNA, 90 nt, Pseudomonas aeruginosa PA01
gagcuaggcccggacgcucgguaacgugggcgcauuuucgauggagucuucccuaugcgcccugcccgucugcuggucuacagccugcuc

SEQ ID NO: 58967 - RNA, 86 nt, Pseudomonas aeruginosa PA01
gagcgccgggaggauccgccagggugucgcgcauugccgcgagguggcgccggugcuguuccuguugcucgauuaccuggcgcauc

SEQ ID NO: 58968 - RNA, 63 nt, Pseudomonas aeruginosa PA01
gagcgcgaggaacgucaggacacgcaggugcuugggcauaacgacuucuuacuucuucagcuc

SEQ ID NO: 58969 - RNA, 59 nt, Pseudomonas aeruginosa PA01
gagcgcugcaagccggcgaguccuucgggaaucgccaggacgaagggcuugccgcccuc

SEQ ID NO: 58970 - RNA, 85 nt, Pseudomonas aeruginosa PA01
gagcggagacgaucaugccggcgccaacggugccguuggucaggcgaucgaugacgaugaaggcgccgguggugcgguucugcuc

SEQ ID NO: 58971 - RNA, 55 nt, Pseudomonas aeruginosa PA01
gagcauccggcacaggcgcaggacgaaacgguuggcgucgguggccgaggugguc

SEQ ID NO: 58972 - RNA, 100 nt, Pseudomonas aeruginosa PA01
gagcaggcggccgagccauuugccgaggaacagccaggcgugggugaggggugcgcgcauggaguggguguccuugguggugugcguuggcugugggcuu

SEQ ID NO: 58973 - RNA, 55 nt, Pseudomonas aeruginosa PA01
gagcagggcuuccaggcggucccucgggaccgugcggaagacgccuuccaagcuc

SEQ ID NO: 58974 - RNA, 58 nt, Pseudomonas aeruginosa PA01
gaugccgacgaucagccggagcaucucgucgauguagucggcggggccgucggucauu

SEQ ID NO: 58975 - RNA, 64 nt, Pseudomonas aeruginosa PA01
gaugaucgcgcagcaacaggggccgguccugcuggugggacacuccuauggcggcgcggugauc

SEQ ID NO: 58976 - RNA, 67 nt, Pseudomonas aeruginosa PA01
gaugcagggcaggauggcgaacagcaggccgagacugaucagccaggccgcgcucuugccccacauc

SEQ ID NO: 58977 - RNA, 85 nt, Pseudomonas aeruginosa PA01
gaugccgcugucacgcgccugaccgguggcgcgguagcgcaccaggcggaaggcggcguccuggaucagcgccuggcgcggcauc

SEQ ID NO: 58978 - RNA, 57 nt, Pseudomonas aeruginosa PA01
gaugccggugcuguccaaggcguuuuccaucagcgccgcggaaagcagccuggcauu

SEQ ID NO: 58979 - RNA, 69 nt, Pseudomonas aeruginosa PA01
gauggagcaggugcgcgauggccaacucgucugccgcugacaagcauccccaggcgcgccugcugaauc

SEQ ID NO: 58980 - RNA, 76 nt, Pseudomonas aeruginosa PA01
gauguucgccggcggcaucgccaaggucggcacccggaugggcaccggccuggccauggcgguggacgacagcauc

SEQ ID NO: 58981 - RNA, 57 nt, Pseudomonas aeruginosa PA01
gauggccagggcgauaugaaggccauuggcggcuacaucgucggcgcccuggugauc

SEQ ID NO: 58982 - RNA, 105 nt, Pseudomonas aeruginosa PA01
gauggcggccagccauuucaccgcguucucgucgaagcggccgaacuugcccugggccagguucagcagcgagccgcuggagaaggcggugauggugccggcguc

SEQ ID NO: 58983 - RNA, 57 nt, Pseudomonas aeruginosa PA01
gauggugaccuggcggacgucgaugccccgauccagggcgcgacgcaggucgccauc

SEQ ID NO: 58984 - RNA, 61 nt, Pseudomonas aeruginosa PA01
gcaagcccuggugcagcgcaaggccggugaaagcacggcggugaacuggaugagggugggc

SEQ ID NO: 58985 - RNA, 76 nt, Pseudomonas aeruginosa PA01
gcaaugccuugcccuccaucuguagcaucgccgccaggcuggcaccgggcagcggcguggagugguagggcugggu

SEQ ID NO: 58986 - RNA, 98 nt, Pseudomonas aeruginosa PA01
gcaauggguagagcaugucgucgucgaauagcggcuuuucgaugcgcagguagccuucgccgucgaacagccgcuucgccagcgcguucgccuguugc

SEQ ID NO: 58987 - RNA, 55 nt, Pseudomonas aeruginosa PA01
gcaacccucggccgaaggcuccgaccagcccuggcaggccgaggccgagaguuuc

SEQ ID NO: 58988 - RNA, 84 nt, Pseudomonas aeruginosa PA01
gcaacggacggccuucgccagcggcgcgcuccagcgccucaaccaggccgcgcagggcccgcucgcugggcggcaugacguugc

SEQ ID NO: 58989 - RNA, 128 nt, Pseudomonas aeruginosa PA01
gauucuccgccggcgaccgccaauccagggugcccagugacaggcgcuggcgucgcgcccguugguucgcugccggcagcgccucgccacgcuccagcgcucgggccucgugaucgcuggcgaggauc

SEQ ID NO: 58990 - RNA, 67 nt, Pseudomonas aeruginosa PA01
gcaaagcuggaagaucaccuguucgaucccgccuaccguuucgcucagguaggucuuguagaagugc

SEQ ID NO: 58991 - RNA, 84 nt, Pseudomonas aeruginosa PA01
gcagcccugcagccaugugcgccggggaugaucggcgagcuguacaucggcggccagugccuggcucguggcuaccugggccgc

SEQ ID NO: 58992 - RNA, 81 nt, Pseudomonas aeruginosa PA01
gcaggaacugcagcgggcgcgggucgucguugccgcugcugcuggcgacgaacagcucgagccccuggcugcgggccucgc

SEQ ID NO: 58993 - RNA, 76 nt, Pseudomonas aeruginosa PA01
gcaggccagcggacgcgacgccuugugggcugccgaacagugccugcgcucgggcaguugcgccgcugugcugugc

SEQ ID NO: 58994 - RNA, 112 nt, Pseudomonas aeruginosa PA01
gcaggcccguuggcugucaagcgguccggccgcgccggcaggaaaaagccccugccgcgauggcaggggcuugccguuuuggccgaacaccgccggaggucagcgggucagc

SEQ ID NO: 58995 - RNA, 77 nt, Pseudomonas aeruginosa PA01
gcaggccgaccgccugggccgccugccagcgcugcggauugcgcagcagggcgaggaucgcccgcgaaguggccugc

SEQ ID NO: 58996 - RNA, 59 nt, Pseudomonas aeruginosa PA01
gcaggcgcgccgggcccugcucaacggccagccggcaugcgccacggcgcgcacccugc

SEQ ID NO: 58997 - RNA, 83 nt, Pseudomonas aeruginosa PA01
gcaggcgcuggaugcgggcaucgccacguacgugagccugaaucugucgcuccagucgagcgaugcgcgccuccagcgucugc

SEQ ID NO: 58998 - RNA, 111 nt, Pseudomonas aeruginosa PA01
gcaggcuggucucgcgcgacagcaggcgcuuggcgcggcggaacagguggcgcaccgacucgucggccuuggccacuuccugcuugaccagcggcgcgaucaccagcuugc

SEQ ID NO: 58999 - RNA, 57 nt, Pseudomonas aeruginosa PA01
gcagcaccgcgacggugcccgccucgcccauggcgcgggcgucguccucggucaugu

SEQ ID NO: 59000 - RNA, 65 nt, Pseudomonas aeruginosa PA01
gcagaugguugucggccugggccuggcgcucgcgcgccuccugcaagcgggccugcaauccuugc

SEQ ID NO: 59001 - RNA, 56 nt, Pseudomonas aeruginosa PA01
gcagcgaccuggcgacgcgccugguggaccugcgccagggcgcgcucgggcgcugc

SEQ ID NO: 59002 - RNA, 88 nt, Pseudomonas aeruginosa PA01
gcagcgcacgaucuccacccgcuggcgcucgccgauggacagcccauggaccagccggcgaggcuccagcggcaugccguagcgcugc

SEQ ID NO: 59003 - RNA, 60 nt, Pseudomonas aeruginosa PA01
gcagcgccacccgcggaucgaacugguaacggguggcgaacuugccguugguggugcugc

SEQ ID NO: 59004 - RNA, 61 nt, Pseudomonas aeruginosa PA01
gcagcgcgcggacuaccggguggccggcuacggcgcgccgcaggugguggccgcgccgcgc

SEQ ID NO: 59005 - RNA, 66 nt, Pseudomonas aeruginosa PA01
gcagcucgaccaggccgggcaggagguagucgccccccagguccucggccccggccaggugacugc

SEQ ID NO: 59006 - RNA, 81 nt, Pseudomonas aeruginosa PA01
gcagccacaccagcagcucgccgagacggccguccugggcacuguccggcagcggcugcucgaugaacugggccuggccgc

SEQ ID NO: 59007 - RNA, 90 nt, Pseudomonas aeruginosa PA01
gcagccacuggcugacgguggugccggugagcuggcggaaaugccgggugaagguccgccggcucaucagcacccgcugugccaggcugu

SEQ ID NO: 59008 - RNA, 69 nt, Pseudomonas aeruginosa PA01
gcagaggcuguugaccacccucgaagcccggagcgaccuugccaccggagcgggaggucagaccuuugu

SEQ ID NO: 59009 - RNA, 72 nt, Pseudomonas aeruginosa PA01
gcaccuccggcggcaucaggcccugcaccgcagugaucgagaggauguagagggccgccgcggccagcgugc

SEQ ID NO: 59010 - RNA, 59 nt, Pseudomonas aeruginosa PA01
gcaccugaaggccuccggcaacggccacguggucaaugucuccagcgucuucgggcugu

SEQ ID NO: 59011 - RNA, 86 nt, Pseudomonas aeruginosa PA01
gcaccugcugcgcgaggaacuggccggcgaggagcagcgcaagaccaucaccuccuucuccggcaucuucagcaauccgcaggugu

SEQ ID NO: 59012 - RNA, 71 nt, Pseudomonas aeruginosa PA01
gcaccgcgucgcgaucgcccaggcccugccggaagcgaucgacaauggccagggcgaccgcgagcgggugc

SEQ ID NO: 59013 - RNA, 68 nt, Pseudomonas aeruginosa PA01
gcaccagcggcggcgcgguggauucgcgcaggaccagcgccggcgccaccacccgccgcugcaucggc

SEQ ID NO: 59014 - RNA, 97 nt, Pseudomonas aeruginosa PA01
cggcucggcuucggcgggcgccgcggcgcucggcagauggcgcgcgaucaguacacgauagccgccggcgccgaggcaggcaccgaggaucggggcg

SEQ ID NO: 59015 - RNA, 89 nt, Pseudomonas aeruginosa PA01
cggcguucgcccggcucgcugccagcgccaggggauccaggucgcaagccaccaccucgcggcgccggcgcgggccgcggcgaucgccg

SEQ ID NO: 59016 - RNA, 77 nt, Pseudomonas aeruginosa PA01
cggcguugccgccuuccagcucggagagucggcgcucaucggcguccgggguuuccugcuggcggcggcucucgccg

SEQ ID NO: 59017 - RNA, 63 nt, Pseudomonas aeruginosa PA01
cgggcagcaccucgccagccggaccgacgagacaguguucgcgcggauggcgggugcgcaccg

SEQ ID NO: 59018 - RNA, 115 nt, Pseudomonas aeruginosa PA01
cggcugcagguagcugagggucaggcuguacuugucguagcgcgcauucggaucgcccgccugcggguggccgcgacccugcgcgccaagggcgccgaugcccugcugccagccg

SEQ ID NO: 59019 - RNA, 78 nt, Pseudomonas aeruginosa PA01
cgggcuacccggccugccuugccgucggaaguaagccggggucgcgacgauggccaagcgcagguccgggccgacccg

SEQ ID NO: 59020 - RNA, 79 nt, Pseudomonas aeruginosa PA01
cggggaaccgucgaggcgggcaacgccgccgacgaucgccgggucgucggcgaaaugccggucgccgugcaguuccucg

SEQ ID NO: 59021 - RNA, 78 nt, Pseudomonas aeruginosa PA01
cggggcgucccgaccugccgcugcgggugcagccggacacccgguccacgcgcuuccggcacuuccacgcgcgccucg

SEQ ID NO: 59022 - RNA, 61 nt, Pseudomonas aeruginosa PA01
cggggagccucgucgacgaggcccgccaugggccaagguuuguugucgggaggcucucccg

SEQ ID NO: 59023 - RNA, 61 nt, Pseudomonas aeruginosa PA01
cgggaagcgcgccugcugcuugagcucgaacugcgccucgagcagcgcuucgcgcaacucg

SEQ ID NO: 59024 - RNA, 66 nt, Pseudomonas aeruginosa PA01
cgggccuuccagggcgcccucggcuacgcccgcgaacgccugcagucgcgcgcccuggucggcccg

SEQ ID NO: 59025 - RNA, 100 nt, Pseudomonas aeruginosa PA01
cgggcgccggacggcagcaccagcgggccgggcuucagcaucgacgcgaccaccaacgugauccaguucaguccggccacuggcaauccgccgacucccg

SEQ ID NO: 59026 - RNA, 63 nt, Pseudomonas aeruginosa PA01
cgggcgccgggugcucccggucgccgcugacagcgcgaguuauaggccagcgcccgguguccg

SEQ ID NO: 59027 - RNA, 57 nt, Pseudomonas aeruginosa PA01
cggucgcgccaugacccuggaggccaacgaaggcuucguccgcgugguggcgcgucg

SEQ ID NO: 59028 - RNA, 59 nt, Pseudomonas aeruginosa PA01
cggucgaggagcagcccggcacugcgcaacugggccagguggcggcugaucuucggcug

SEQ ID NO: 59029 - RNA, 61 nt, Pseudomonas aeruginosa PA01
cggucucuccgcugcugcugggcuggcagcaacgcuggcggcaguuccggcggauggucug

SEQ ID NO: 59030 - RNA, 61 nt, Pseudomonas aeruginosa PA01
cggugagcugcgcgaaggcgauacgcuggugcuuggcaucggcgugcgcgcuggcuggcug

SEQ ID NO: 59031 - RNA, 116 nt, Pseudomonas aeruginosa PA01
cggugaucgaccagcacggccgcaccgcguuguucaccggccgcgaggcgcuuggcguccaccaugcgcgggccggcgaacaaugcguggcggccggcaaccugcuggccgcgccg

SEQ ID NO: 59032 - RNA, 85 nt, Pseudomonas aeruginosa PA01
cgguggcgauccucaccgcggcgaugcgcuucgccggccagggcggccaggccggcaccgaugucaccgcggugcagagcacccg

SEQ ID NO: 59033 - RNA, 113 nt, Pseudomonas aeruginosa PA01
cgguggacaucuuguccggcaccaccagcaccacccgguagcccuucgcgcggccgaccagggccaggccgagaccgguguugccggcgguggccucgacgauggugccaccg

SEQ ID NO: 59034 - RNA, 68 nt, Pseudomonas aeruginosa PA01
cgguggacggcaucgcgaccuuccgcguggacaucgauguguccaccugcggagugaucuccccgcug

SEQ ID NO: 59035 - RNA, 63 nt, Pseudomonas aeruginosa PA01
cggguugugcuggagcugcuguccgaccacacagaauuguucaagcaguucagcgacaacccg

SEQ ID NO: 59036 - RNA, 71 nt, Pseudomonas aeruginosa PA01
cggguggcgcaggccugccggaugaucgagacggcggagacgccgccggcacuggaggcgcuggccgcccg

SEQ ID NO: 59037 - RNA, 67 nt, Pseudomonas aeruginosa PA01
cgguagcccuuguggucacugccuggagcggccgcggccugcccacggcgcugccacagaagcacug

SEQ ID NO: 59038 - RNA, 69 nt, Pseudomonas aeruginosa PA01
cgguccaccacggcgaccacguugggguucucgccaagggcgcggaugcugauggugccguccuggccg

SEQ ID NO: 59039 - RNA, 66 nt, Pseudomonas aeruginosa PA01
cggucccgacggccagaaaggcgccgaccuggcuccggccagcgccgagcugaagcuguaggaucg

SEQ ID NO: 59040 - RNA, 73 nt, Pseudomonas aeruginosa PA01
cgggguguccuggcgggugcugcuggaggaccugcaacaggucuaccgucaguucgccgagggcgccgaaccg

SEQ ID NO: 59041 - RNA, 76 nt, Pseudomonas aeruginosa PA01
cgggucgcccggcuguucgucgccggcggugugcgcaagcugcgccugaccggcggcgagccgcuggugcggcccg

SEQ ID NO: 59042 - RNA, 102 nt, Pseudomonas aeruginosa PA01
cgggugaagccuucguucacgucgaucagcgugccgucuucgaggcugcugaucagcagaccgucgggguaggcauggaaggcguuggcgaacuucuccucg

SEQ ID NO: 59043 - RNA, 62 nt, Pseudomonas aeruginosa PA01
cggcgacgcgcuguucagccugcgcugcgauugcgguuuccagcuggaaggcgcgcuugccg

SEQ ID NO: 59044 - RNA, 62 nt, Pseudomonas aeruginosa PA01
cggcgaaaacaccagccuuucaggaauauuuuucaugcccgcaaggcauggguuuuucgucg

SEQ ID NO: 59045 - RNA, 62 nt, Pseudomonas aeruginosa PA01
cggccuugagcaggacgucggucuggcgcaguugcgccgggaggaagucauugcccgggccg

SEQ ID NO: 59046 - RNA, 130 nt, Pseudomonas aeruginosa PA01
cggccuggacuucugcgcgaucgcccgcggcuauggcgucgaggcgcuccacgcagccacccgcgaagagcuggaaggugccuugaagcaugcccuggccgcugaucgcccgguuuugaucgaggugccg

SEQ ID NO: 59047 - RNA, 82 nt, Pseudomonas aeruginosa PA01
cggccuggauuugucguucuggguugcacgcgggcgggccaggggccgcgccggugucagcgggccaggggcggucgggccg

SEQ ID NO: 59048 - RNA, 63 nt, Pseudomonas aeruginosa PA01
cggcggcagguuuucucgacgccgcaagcgaacgcccaccggcgaagaacaauuugcgcgccg

SEQ ID NO: 59049 - RNA, 64 nt, Pseudomonas aeruginosa PA01
cggcggcggccagccaggcccgcaccaggccgcgccgguggacuggcacuggcuggcccugcug

SEQ ID NO: 59050 - RNA, 71 nt, Pseudomonas aeruginosa PA01
cggcggcggcgagccggcgcucggccgcgcggacguccgggcggcgcgccagcaggcuccagccgucgccg

SEQ ID NO: 59051 - RNA, 109 nt, Pseudomonas aeruginosa PA01
cggcggcggugaccugggcgaucaugaagccggaguugaccccgccguuggccaccaggaacggcggcaacugcgacaugugcauguccaucaucagcgagaugcgccg

SEQ ID NO: 59052 - RNA, 71 nt, Pseudomonas aeruginosa PA01
cggcguagcccugguucgugcccugcaagccaucgaaggccugaagggugacaacgaggagcagaacgucg

SEQ ID NO: 59053 - RNA, 95 nt, Pseudomonas aeruginosa PA01
cggcguaguccggggcguugaagauggccgagccggcgacgaagguaucggcgcccgccgcggcgaucucacggauguucuugacguugacgccg

SEQ ID NO: 59054 - RNA, 67 nt, Pseudomonas aeruginosa PA01
cggcguggccggcgcgauggcguccacgguggugcugcccuggccgccgguauugccggccgggucg

SEQ ID NO: 59055 - RNA, 64 nt, Pseudomonas aeruginosa PA01
cggcgccaucggcucgcugcgcggcccgcugcacggcggcgccaacgaggcggcgauggaacug

SEQ ID NO: 59056 - RNA, 64 nt, Pseudomonas aeruginosa PA01
cggcgccgacaucgcgcagguccaacucgacggcaagccgcuggccgaccugcugauggcgccg

SEQ ID NO: 59057 - RNA, 80 nt, Pseudomonas aeruginosa PA01
cggcgcgcuggugcaauggcuguugcgcgaagucccggcgcucugaugcgccugcgcaacuggccgcgcuggcagcgcug

SEQ ID NO: 59058 - RNA, 62 nt, Pseudomonas aeruginosa PA01
cggcccgcgcagcgaccugccgcaacugcaccugugcggcugcgaacgguccugcgccgccg

SEQ ID NO: 59059 - RNA, 89 nt, Pseudomonas aeruginosa PA01
cggccagccgcugagcccgcagcgccggcgccugcucgccgcccucggccagccucuggcccaggcccuggcgcgggcucgccuggccg

SEQ ID NO: 59060 - RNA, 62 nt, Pseudomonas aeruginosa PA01
cggccagcggcuggcugacgaugaccacggucaucagcgcccacuucggcugcuccaggucg

SEQ ID NO: 59061 - RNA, 62 nt, Pseudomonas aeruginosa PA01
cggcagggccuugcgggaccggggaggaaccgcucugcggcuggguuccgucggccuugccg

SEQ ID NO: 59062 - RNA, 102 nt, Pseudomonas aeruginosa PA01
cggcaguuguauggaaaggaaacgcguccggcgcgaggcccggcguucggcuagaggcagccgaggccagggcggcggcgucaggauccggagcaauagucg

SEQ ID NO: 59063 - RNA, 82 nt, Pseudomonas aeruginosa PA01
cggcauucccggcucggcccuggugauccucgccgccacccucaccgcggugccggcgaucccgguggccggccuggugcug

SEQ ID NO: 59064 - RNA, 126 nt, Pseudomonas aeruginosa PA01
cggauguucucgccgccggccaggcgcucggcgaacagcgugccggugcgucguucgugggcgauguagucgaugcgcuggcgcaccagcuugccgaaguucugucggcugucggaaacccauucg

SEQ ID NO: 59065 - RNA, 129 nt, Pseudomonas aeruginosa PA01
cggaagcccccuccagcaaguagccgaaggucggcuucgaguggaccagcgguagcgcggucgccgccaacgcgccccacuggcgccgcucgaaggcgccgaagggcuggcugaaaucgaggaugcccg

SEQ ID NO: 59066 - RNA, 71 nt, Pseudomonas aeruginosa PA01
cggcacuuacagcgucgacauucauuugaaccagaucaugauccggcgcgaagaugucguguucagugccg

SEQ ID NO: 59067 - RNA, 56 nt, Pseudomonas aeruginosa PA01
cggcagcagcgccggcgaggagggcuaccguauccgcguccuggcgcucgaugccg

SEQ ID NO: 59068 - RNA, 130 nt, Pseudomonas aeruginosa PA01
cggcagcaugcugaugaccacgucggcgcccugcaccgcgucgcgggcgcugcgggcggcgcuggcgccggcggcgaccaggccgucgacggcgcucugcaccaggucgaagacguucagcagguagccg

SEQ ID NO: 59069 - RNA, 81 nt, Pseudomonas aeruginosa PA01
cggcagcgagcugcaacugggccuggucgccgcggaccggggucucggccuggugccggcgccggcccuggcgcguagccg

SEQ ID NO: 59070 - RNA, 83 nt, Pseudomonas aeruginosa PA01
cggcagcggcggcaauacgucgcucagucaacuggccuucgaucccgcgacggcucccaagcucagcgacggcgccgcugccg

SEQ ID NO: 59071 - RNA, 82 nt, Pseudomonas aeruginosa PA01
cgccaccggcgcgccggcagccugcugcgcgccuaugucuggccgcugggcgcguacaucggugucggcgcggugcuuggcg

SEQ ID NO: 59072 - RNA, 59 nt, Pseudomonas aeruginosa PA01
cgcaggcugccggcggcuaccugguggaacagcggcaggaagcuuuccggcaguucgcg

SEQ ID NO: 59073 - RNA, 76 nt, Pseudomonas aeruginosa PA01
cgcagggcacgccggcgaggcugcggcgcucgcggacgacgccgccggcgcccagcgucgccaggcucagcccgcg

SEQ ID NO: 59074 - RNA, 112 nt, Pseudomonas aeruginosa PA01
cgcauccaccaucaugucaccgcccuggccuauccgcugcucgaacgcagcggcaucgauccgauggcgaagcggccggaugagccagggcaaggggagggaucggcaugcg

SEQ ID NO: 59075 - RNA, 58 nt, Pseudomonas aeruginosa PA01
cgcauggcgaaggcccucucggagugacgacugaaacacucaggccuggagccgagcg

SEQ ID NO: 59076 - RNA, 70 nt, Pseudomonas aeruginosa PA01
cgccagcaggcggcgguccagcucgcacaggcggcgacgcccggcgagacuggcgcugccgccggcggcg

SEQ ID NO: 59077 - RNA, 65 nt, Pseudomonas aeruginosa PA01
cgccagccugcucgcuggcgagcgcggcgaacaggcggcguuguugcuggacgagcggcuggacg

SEQ ID NO: 59078 - RNA, 94 nt, Pseudomonas aeruginosa PA01
cgccagcgccggcagcucggcaagggcgccgcgggucaccugcuggcccgccugggugcccuggcugaccagcgccgccggggugucgcuggcg

SEQ ID NO: 59079 - RNA, 59 nt, Pseudomonas aeruginosa PA01
cgccaggccggcuuucagcgcggccagggccgccugguaguagcugcggccggccggcg

SEQ ID NO: 59080 - RNA, 94 nt, Pseudomonas aeruginosa PA01
cgccaggcgcuugcgcacgaugcugucgguggucgggcucggcgugccgcgcuggccgaguuccgccgacagggucggcaacgggcagccggcg

SEQ ID NO: 59081 - RNA, 113 nt, Pseudomonas aeruginosa PA01
cgccgacugcggcaggucgacaccgcgcggcaggugcgccaucggugccucggccggcaggccggcggccaguuggcgggccaccguggcgcugaaggccugcagggucggcg

SEQ ID NO: 59082 - RNA, 84 nt, Pseudomonas aeruginosa PA01
cgccgcaaucacggucuugaguugacuggccaugucggcagcacugacgaaggccgggucgauacgcaggcugugacguccacg

SEQ ID NO: 59083 - RNA, 65 nt, Pseudomonas aeruginosa PA01
cgccgcagcuggcccggcaaaccuucgucgacacccucgggugcgauccgggcuggcugcaggug

SEQ ID NO: 59084 - RNA, 92 nt, Pseudomonas aeruginosa PA01
cgccgcagggcuaucgaaucggcgucacggugcauggcgaucgccugccggcgccaccgcagagugccgaaugcucgcuggccuaccuggug

SEQ ID NO: 59085 - RNA, 72 nt, Pseudomonas aeruginosa PA01
cgccgccagcaguucgcgggcacgggccaccgccaacggcuccugcccggccuucggcgcuucuggcaggcg

SEQ ID NO: 59086 - RNA, 76 nt, Pseudomonas aeruginosa PA01
cgccgccaggcugcggucgccggcggcgcgccggcugggccgauagccggcggccucggcggccucggcaguggcg

SEQ ID NO: 59087 - RNA, 92 nt, Pseudomonas aeruginosa PA01
cgccgccccgguguccuccucggcgcugguggccgaaggcgugaaggucuucgucgauccccagggccgcggagcgcaggccggcggcggcg

SEQ ID NO: 59088 - RNA, 83 nt, Pseudomonas aeruginosa PA01
cgccgccccugcgcuggcguucgacgagcuggagcggcgcacuggcggccugccguugaagucggcgcccugggggaaggacg

SEQ ID NO: 59089 - RNA, 74 nt, Pseudomonas aeruginosa PA01
cgcccucucccaccugcugggucgccgcguauucaugcuccgggaaauccggcaggucguugggauuggaggcg

SEQ ID NO: 59090 - RNA, 72 nt, Pseudomonas aeruginosa PA01
cgcccugcugccccggcgcggcugagcaugccggcccacgcggucagccuggcgccgggcgcggcggcagcg

SEQ ID NO: 59091 - RNA, 130 nt, Pseudomonas aeruginosa PA01
cgcccuggccguuguccagcuucccggcgaugcucagggucacgucgcuuucgccggagacaaugcccugggcguuauccaggcuggcggcgucgauccguugcgcgcccuugcugaccagcgcgcccug

SEQ ID NO: 59092 - RNA, 130 nt, Pseudomonas aeruginosa PA01
cgcccuggccguuguccagcuucccggcgaugcucagggucacgucgcuuucgccggagacgaugcccugggcguuauccaggcuggcggcgucgauccguugcgcgcccuugcugaccagcgcgcccug

SEQ ID NO: 59093 - RNA, 61 nt, Pseudomonas aeruginosa PA01
cgcccuggugcugaucgucggugccgcccugcugcucuggagccgaccggcggcccaggcg

SEQ ID NO: 59094 - RNA, 129 nt, Pseudomonas aeruginosa PA01
cgcaccugcaccauggcguggucgcccggggcaaccugagcgucggcggcgcggucaaggccgaggucgacgccucgguacgccaggccaccgcgcucaaccacuccgcgacccaccugcugcaugccg

SEQ ID NO: 59095 - RNA, 61 nt, Pseudomonas aeruginosa PA01
cgcagccaacggccgaggaacuggccgcccuggaagaggcugcccggccgcuguggcugcg

SEQ ID NO: 59096 - RNA, 77 nt, Pseudomonas aeruginosa PA01
cgcagcgagguuucgccagccauggucgguccgcgucggguggaucggaaaagugcuggcgaguguggccgcgggcg

SEQ ID NO: 59097 - RNA, 98 nt, Pseudomonas aeruginosa PA01
cgcagcgcuccccgguggccuugagcagguaagcggcaucggcuaccucguagucggugugccggcgcggcguaccguucgccugggauucgcguucg

SEQ ID NO: 59098 - RNA, 87 nt, Pseudomonas aeruginosa PA01
cgcaggacgaagcgguuggcgucgguagcgguggucgcuaccugccagaacggcaggccgaagcgcugcgccagcaacucgccugcg

SEQ ID NO: 59099 - RNA, 130 nt, Pseudomonas aeruginosa PA01
cgauguugagcaguucgauuucuccgccgcgaauccgcagcaggcucaggcaggccgccggcaugucuucgaggucgugccagucgcggccgcucugggcgcggaagucgcccuggauaucguugagcag

SEQ ID NO: 59100 - RNA, 56 nt, Pseudomonas aeruginosa PA01
cgaugcgggcgccacucucgaucaccgcauaggcgccgacgcuggcgcucggaucg

SEQ ID NO: 59101 - RNA, 76 nt, Pseudomonas aeruginosa PA01
cgagucggcgauggccagcagcgcggcgaucacuuccgcgucauucuugccgcgcaggucggcgaucccguacucg

SEQ ID NO: 59102 - RNA, 55 nt, Pseudomonas aeruginosa PA01
cgaggccggcguggcgaaguaggcgaccagcggcaguucgucauccaccgccucg

SEQ ID NO: 59103 - RNA, 59 nt, Pseudomonas aeruginosa PA01
cgaggcggccgaggaaauagcccuggcgauugccggcgcggacuuccuggaucgccucg

SEQ ID NO: 59104 - RNA, 128 nt, Pseudomonas aeruginosa PA01
cgagggcgcuauccagucguuccaggucggcgcagaggaucaccccggcgucgcgcaucucgucgcaggcccgcugcgcgguguccucggcgauggcccggcaggcgggcagguagagcagcaccucg

SEQ ID NO: 59105 - RNA, 120 nt, Pseudomonas aeruginosa PA01
cgaucuccugcucguggccgaggaucgcgcgcaagcgcucgccggcuuccugccaggucagccgcuggaagcccaggcgugcguagaacggcgcguuccagggcacgucgcagaaggucg

SEQ ID NO: 59106 - RNA, 57 nt, Pseudomonas aeruginosa PA01
cgaucgccccgcgcagguugaucacgcccuugaugaagggcggcgcguuggcgaucg

SEQ ID NO: 59107 - RNA, 78 nt, Pseudomonas aeruginosa PA01
cgauccgcggccugggcaagcucggcaagggcauccaggaagccaaguucgucggcgugcccggcgcccccggggucg

SEQ ID NO: 59108 - RNA, 57 nt, Pseudomonas aeruginosa PA01
cgcuuccggcgaagcuccagcgacucguucgagaucgggcugcgaucggcggaagcg

SEQ ID NO: 59109 - RNA, 96 nt, Pseudomonas aeruginosa PA01
cgcuucggcagcgacaagcgccuggcgcgccuggcugauggcacgacccugcuggcggccagcguggcgcgggcgcgcgaggcguucgccgaggug

SEQ ID NO: 59110 - RNA, 63 nt, Pseudomonas aeruginosa PA01
cgcuggucggccugcuccgcgcgcgcgacgaggcgcaugcgcuggaguuggccaacgccagcg

SEQ ID NO: 59111 - RNA, 67 nt, Pseudomonas aeruginosa PA01
cgcuggaggcgccgcgcuggaagcugaaguuggacaggcaaugcaguucggcguaggcgcucaugcg

SEQ ID NO: 59112 - RNA, 80 nt, Pseudomonas aeruginosa PA01
cgcugcgggaggacccggacaucauccuggucggcgagaugcgcgaccuggaaaccauccgccuggcccugaccgcggcg

SEQ ID NO: 59113 - RNA, 102 nt, Pseudomonas aeruginosa PA01
cgcucugcaggucgagguugccggcccggcuguccaggcggccggccugguuguccagcgcgccaccgauacgcagccgguugucgcccugggccuggagcg

SEQ ID NO: 59114 - RNA, 71 nt, Pseudomonas aeruginosa PA01
cgcggcugccggcgcggcgguugaggccuucgagguaggcguugaccugguugcgccgguauggcgucggg

SEQ ID NO: 59115 - RNA, 96 nt, Pseudomonas aeruginosa PA01
cgcggugacugccugucgcucgccggccuggcccgcgaagucagcgccaucuacgacguuccgcuggcgccgguggcgguggacgcggucgccgcg

SEQ ID NO: 59116 - RNA, 65 nt, Pseudomonas aeruginosa PA01
cgcggugcagcugcucgguggccacggcuucaccaaggagcauccggccgagcgcugguaccgcg

SEQ ID NO: 59117 - RNA, 71 nt, Pseudomonas aeruginosa PA01
cgcggcgacccgccaggcgcugggcgagucgcucugcgaggugcucgccggagcgguggcgggcggcggcg

SEQ ID NO: 59118 - RNA, 130 nt, Pseudomonas aeruginosa PA01
cgcuaucuuugcgaccuggaaaaaaucgcgcgagccuggcuccgccuucuugucguuguggucugucgaaucccgcgcgggcaguggcggacaggccgccucaggcgauugcccaggucgcgagacagcg

SEQ ID NO: 59119 - RNA, 79 nt, Pseudomonas aeruginosa PA01
cgcucgaucggccugggccuggaagacguagcccuggccaacgcccucuaccgccugcgccaggcaggcugaucgcgug

SEQ ID NO: 59120 - RNA, 66 nt, Pseudomonas aeruginosa PA01
cgcucggccagggcaaugucgaagccgaccgagagcgccuuggccuugucgucguccuggcuggcg

SEQ ID NO: 59121 - RNA, 88 nt, Pseudomonas aeruginosa PA01
cgccgggcccaccgucacgccgagggcuaucauucccgcgccgcgcgccaccagcggcccggcauggaccccggcgucgggcuuggcg

SEQ ID NO: 59122 - RNA, 62 nt, Pseudomonas aeruginosa PA01
cgccguagcgaccgguguagcgccggcugcuguucugcacgucggcgcggaaggucgcggug

SEQ ID NO: 59123 - RNA, 68 nt, Pseudomonas aeruginosa PA01
cgccggcgcuguuguccaggcucccgccugucaccgucaggcccugccauccggagagcaggccggcg

SEQ ID NO: 59124 - RNA, 78 nt, Pseudomonas aeruginosa PA01
cgccugcccggcuucgagcuggcgcuccuggccgcucuggaccagggcgaugucgaccucgccggugccgagcaggcg

SEQ ID NO: 59125 - RNA, 78 nt, Pseudomonas aeruginosa PA01
cgccuggccgagcaggccggggugaccaagccgguggucuaugaccacuucggcacccgcgccggccugcuggcggcg

SEQ ID NO: 59126 - RNA, 58 nt, Pseudomonas aeruginosa PA01
cgccugggcgaacucgccccgccgaccagccgcgcccugcacugaggccgcucaggcg

SEQ ID NO: 59127 - RNA, 76 nt, Pseudomonas aeruginosa PA01
cgccggccagguggagcguugcggcgccggcgggguuuccaguuggcggccgucgcgcaccaccaguucgccgccg

SEQ ID NO: 59128 - RNA, 71 nt, Pseudomonas aeruginosa PA01
cgccgccgcgcaggcgguacaggcggcugucgccggcccacaggcagcucgccugguugccgcgcgcggcg

SEQ ID NO: 59129 - RNA, 130 nt, Pseudomonas aeruginosa PA01
cgccggacgggguaccggugcgcuggcggauagcgccagggcgcuauucgcccuacggguuacgaggagcucggguagggcgaauagccgcucgcggcuauccgccgggcgggguaccggugcgcuggcg

SEQ ID NO: 59130 - RNA, 72 nt, Pseudomonas aeruginosa PA01
cgccggcaccugcacgcccaguuguuucugcgccucgaacagcgagcgcaggaacagggucagggucggucg

SEQ ID NO: 59131 - RNA, 94 nt, Pseudomonas aeruginosa PA01
cgccggcagaagcucuacggcagccugcggcugcuggugucgaucaaccgcgacggcaccaucuacgaggugcaggugcuggagucuuccggcg

SEQ ID NO: 59132 - RNA, 86 nt, Pseudomonas aeruginosa PA01
cgcgaggccugcgcccggcucuacggcccguuccugcgcggcgaggcacugccggagcgcgccgagggcagcacgcggaucccgcg

SEQ ID NO: 59133 - RNA, 91 nt, Pseudomonas aeruginosa PA01
cgcgccaggcgcccgaucccgcugcucgcgccgaagcgccgggaaugccgcagcaugacggucuguugcgccagcggaugcgccugcgacg

SEQ ID NO: 59134 - RNA, 85 nt, Pseudomonas aeruginosa PA01
cgcgcugauccugcugggcggcugugccgcgguggggcccgacuaugcgccgccgagcgcguccgcaccggccagcuucggcgcg

SEQ ID NO: 59135 - RNA, 74 nt, Pseudomonas aeruginosa PA01
cgcggaacgccuugcgaggugguccugcuggauaucuccaugcccggcgucaauggccucgaggcgauuccgcg

SEQ ID NO: 59136 - RNA, 65 nt, Pseudomonas aeruginosa PA01
cgcggcccugcgaccagagcugggccagggccaugucggcgcuggccuggccggcgcgggcggcg

SEQ ID NO: 59137 - RNA, 72 nt, Pseudomonas aeruginosa PA01
cgcaccggcgccgugaccccgguggcacgccucaagccggugcagguggccggcgucacgguguccaaugcg

SEQ ID NO: 59138 - RNA, 103 nt, Pseudomonas aeruginosa PA01
cgcgccacaccuggcgcuggcccgcgagcaggggcuggacggccugaucagccucggcggcgcccacuccaaccaccugcacgcgcuggccggcgcuggcgcg

SEQ ID NO: 59139 - RNA, 56 nt, Pseudomonas aeruginosa PA01
ccuggagcggcgcaucgcgguggagaacauuuccuacuaugcagcgccguaccggg

SEQ ID NO: 59140 - RNA, 88 nt, Pseudomonas aeruginosa PA01
ccuggccugcgagcgcgaggaaaccucgcuggccggcgagaucgccaccacgguggauuuccucgaggugaucuucgacgaggccggg

SEQ ID NO: 59141 - RNA, 129 nt, Pseudomonas aeruginosa PA01
ccuggcggcgcggaucggccugcuguuccccggccccucggcggccuggcugcaacgcgccgagcgccugcggcggcagcaggcgucggcgggccucggggucaggcgcggguggccugcaucgacggg

SEQ ID NO: 59142 - RNA, 103 nt, Pseudomonas aeruginosa PA01
ccuggcuggcaacaucgaugaccacccggugcgcgcccuucugcgaguaguguucgagcaucugcugcaggcgcccgccgaagucccagguguugcgcucagg

SEQ ID NO: 59143 - RNA, 122 nt, Pseudomonas aeruginosa PA01
ccugggcgcgcugcgccggcagcagcuccugcuggcgcugcaccuccugcucggcgaccugcuuggccuuguucugccggugccagauccaguaggcggcagcgccggccagggcgccgagg

SEQ ID NO: 59144 - RNA, 83 nt, Pseudomonas aeruginosa PA01
ccugguacuggaagcgaucggcgcggcugaucgacugggccaguuccaccgguuggccgguacggucgcgggacagggugagg

SEQ ID NO: 59145 - RNA, 77 nt, Pseudomonas aeruginosa PA01
ccugguccuugaacgccuggcuggcgcgcgggucggugacgucgucccacuccagcagggucuucagcaguuccggg

SEQ ID NO: 59146 - RNA, 62 nt, Pseudomonas aeruginosa PA01
ccugguggaaguggucgaggccccggagcauccgugguucgucgccugccaguuccacccgg

SEQ ID NO: 59147 - RNA, 68 nt, Pseudomonas aeruginosa PA01
ccugguggcgcgccagcagcucggcgagggcgcguuucuucucgucguccaugcucgcgcccaucggg

SEQ ID NO: 59148 - RNA, 77 nt, Pseudomonas aeruginosa PA01
ccugcaacagcuccgccaccuccuccccggugagcaggcgggcgucgcccucgcggcggucggcggcaauguucagg

SEQ ID NO: 59149 - RNA, 77 nt, Pseudomonas aeruginosa PA01
ccuacgagccgccggccgaggcgccggaccaggacuacccguucuggcucgccaccggccgggugcucgaacacugg

SEQ ID NO: 59150 - RNA, 56 nt, Pseudomonas aeruginosa PA01
ccugauguucggcgcauccgccagccugauggcugccgaccugccccggacgaagg

SEQ ID NO: 59151 - RNA, 78 nt, Pseudomonas aeruginosa PA01
ccugcuacgaccaccuggccggcgaacucgcggucgguguguucgcacggaugcuggaugccggcuggaucgagcagg

SEQ ID NO: 59152 - RNA, 62 nt, Pseudomonas aeruginosa PA01
ccugcugcgccauccacggcgcgaccugcugaaacugaacaucgacgccggcggcgugcagg

SEQ ID NO: 59153 - RNA, 63 nt, Pseudomonas aeruginosa PA01
ccugcugcucgaggaaugguuccugcgccgcguccagggccggcauuuccccgagcugcacgg

SEQ ID NO: 59154 - RNA, 77 nt, Pseudomonas aeruginosa PA01
ccugcugcuguccuucgaccccgagcugacccgcggccgcacggcgccggcgcucaagggucgcuacagcguacugg

SEQ ID NO: 59155 - RNA, 95 nt, Pseudomonas aeruginosa PA01
ccugcccaagagccucgaggccuauuaccaggaaaccggccgcgccggccgcgauggccugccggccgacgccuggauggccuacggccugcagg

SEQ ID NO: 59156 - RNA, 74 nt, Pseudomonas aeruginosa PA01
ccugccgguggagcgcgugaccggcuacgguucgcucgacgagcaccugaccgccaugcgcuauuccgacuggg

SEQ ID NO: 59157 - RNA, 67 nt, Pseudomonas aeruginosa PA01
ccugccuacgacgugcgcgagcaccuccaacgcggcgagcugcgcgaggugcugccgcaguggcggg

SEQ ID NO: 59158 - RNA, 69 nt, Pseudomonas aeruginosa PA01
ccuacacccucgacggcgacgacgugcugaugcagaaggcgccggugagcuucgacgugucgguguggg

SEQ ID NO: 59159 - RNA, 63 nt, Pseudomonas aeruginosa PA01
ccguagcgaugcuggucgcgcggagucaccgcaaggaccacugccgggcggccggcgacacgg

SEQ ID NO: 59160 - RNA, 106 nt, Pseudomonas aeruginosa PA01
ccgucgacggaacgaucggcgcgcgccggcaucaagagaguaguaccccgcuguuacucgccgcccggucgaccgccauacacugccgauccguuucguucgaggg

SEQ ID NO: 59161 - RNA, 63 nt, Pseudomonas aeruginosa PA01
ccgugcagcucggggaaaugccggcccuggacgcggcgcaggaaccauuccucgagcagcagg

SEQ ID NO: 59162 - RNA, 57 nt, Pseudomonas aeruginosa PA01
ccgugcgcgugcacguuuccucgcuacugcgcgcccuggaagugaacacgcggacgg

SEQ ID NO: 59163 - RNA, 91 nt, Pseudomonas aeruginosa PA01
ccguggcgccggauagcgccucggccaguucgucguucagugccagcaggcggcgggcauagccgagcagcguaucgccggcgucggucgg

SEQ ID NO: 59164 - RNA, 57 nt, Pseudomonas aeruginosa PA01
ccucgccgcgagcguggcacuccgggaucgcgugaggaaugccgagcuugugguagg

SEQ ID NO: 59165 - RNA, 90 nt, Pseudomonas aeruginosa PA01
ccucggacaagcuguucggcgcacggcgcaugccggccugcgugaucagccugcuggcgcugaccgucugccuggcgcuguucgucccgg

SEQ ID NO: 59166 - RNA, 127 nt, Pseudomonas aeruginosa PA01
ccucgggagccgcuucgcgccagcggcgcagccagcccugggcgucgcucagguagcugucgcgcugccugggcgugcgcagggccuggagcagcgacuggaacagggcauagcgguauucccgcgg

SEQ ID NO: 59167 - RNA, 125 nt, Pseudomonas aeruginosa PA01
ccucguccucgcgaacgaucagguuguacuggcucugcaucgagaugaauugcgccaggccgugguggcgcuggaaggcgagcaucuucaugaagcgccaggccggcaucgacgaggcgccgagg

SEQ ID NO: 59168 - RNA, 78 nt, Pseudomonas aeruginosa PA01
cgaagaugcugcccuccaccgcguagcugaccuugccguccagacgguagccgaccguggugagcaggcgguucuucg

SEQ ID NO: 59169 - RNA, 102 nt, Pseudomonas aeruginosa PA01
cgaacggcaaguaccuggugggcuaccugguucccggcgagacaccgcguuccagcgccgacucgccggccggacugaugguggagcagggcgccugguucg

SEQ ID NO: 59170 - RNA, 66 nt, Pseudomonas aeruginosa PA01
cgaaccacuggcaggccgaggacaucgaccgacgcaucgaacgcaagcucggcccgcuguggcucg

SEQ ID NO: 59171 - RNA, 120 nt, Pseudomonas aeruginosa PA01
cgaccuucugcgacgugcccuggaacgcgccguucuacgcacgccugggcuuccagcggcugaccuggcaggaagccggcgagcgcuugcgcgcgauccucggccacgagcaggagaucg

SEQ ID NO: 59172 - RNA, 77 nt, Pseudomonas aeruginosa PA01
cgagcacgacgccccggugcucuucccgcgcggcgucgagcgccugcaaccgggcccggcgcugggcguggugaucg

SEQ ID NO: 59173 - RNA, 119 nt, Pseudomonas aeruginosa PA01
cgagcagcagccgcgaggcgcccagcccgcaucucaccggcggcgcgguggacgucacccugugcgacgcccagggccgcuggcuggacaugggcagcgccuucgacgaagcugugccg

SEQ ID NO: 59174 - RNA, 58 nt, Pseudomonas aeruginosa PA01
cgagcaggccgagcgcgcccuggccgccugggaggugccgcaugcuugagccucuucg

SEQ ID NO: 59175 - RNA, 64 nt, Pseudomonas aeruginosa PA01
cgagcggccagggccugcaccggacgcucgccgguguaggugacgcgcuuuggccggaugcucg

SEQ ID NO: 59176 - RNA, 57 nt, Pseudomonas aeruginosa PA01
cgagccuugaaaagucgccggcgccgugguggcgccggcucgucucagucgagcuug

SEQ ID NO: 59177 - RNA, 55 nt, Pseudomonas aeruginosa PA01
cgaggaacaugccgaugaucaucacuccgucgauccgguccagcggcgugccuug

SEQ ID NO: 59178 - RNA, 83 nt, Pseudomonas aeruginosa PA01
cgaggagccgggagcggaccgccugcucggccuguuccugaacacccugccgugccggcugucggcuuccgucgaucugcucg

SEQ ID NO: 59179 - RNA, 59 nt, Pseudomonas aeruginosa PA01
cgaggaggacgcucgcggucgccugacccugaauuucgacuacgccgcggaccucuucg

SEQ ID NO: 59180 - RNA, 75 nt, Pseudomonas aeruginosa PA01
cgaccgaugccggccugcucuggcgccuguaccgcgaacgggugccggcgauccucggcaaggccgguucggucg

SEQ ID NO: 59181 - RNA, 74 nt, Pseudomonas aeruginosa PA01
cgaccgcugguggguggcgagcaagaaccugcugcucuucggcggcucguucaucgccaucugccuggugcucg

SEQ ID NO: 59182 - RNA, 74 nt, Pseudomonas aeruginosa PA01
cgaaggcgauggucgccaccaugaucaagccuuccucguugaggaagcgcuucugguggugggcacgcaguucg

SEQ ID NO: 59183 - RNA, 90 nt, Pseudomonas aeruginosa PA01
cgaagguggccccgguguccaucgccaucgcccugcugaugcucggcggcggccucugguauggcaagcaccugaagaucggcgaccucg

SEQ ID NO: 59184 - RNA, 65 nt, Pseudomonas aeruginosa PA01
cgaccaggccgggcaacugcgcgacauggugcagaaccaccugcugcaacugcucugccugaucg

SEQ ID NO: 59185 - RNA, 71 nt, Pseudomonas aeruginosa PA01
cgaccaggccguguucgccguggccggggugggcgaaggccagcgccggagcggcgagcagggcgagggcg

SEQ ID NO: 59186 - RNA, 62 nt, Pseudomonas aeruginosa PA01
cgaccagggcuucaccaucggcggggcgcgccagcgccucuccggcgacgaggccaaggacg

SEQ ID NO: 59187 - RNA, 62 nt, Pseudomonas aeruginosa PA01
cgacgaucuggucguucucgcccucgcugaggaaggcgccacgguuaucgcccaguucgucg

SEQ ID NO: 59188 - RNA, 59 nt, Pseudomonas aeruginosa PA01
cgagagcuucgccaaccugauggacuacgguuucaccgccgggauggaggagcaucucg

SEQ ID NO: 59189 - RNA, 84 nt, Pseudomonas aeruginosa PA01
ccgccauggucgaggaccaggcguacguauagcagggcgauggugaacgucuugccgguaccggcgcuggccucgaucaggcgg

SEQ ID NO: 59190 - RNA, 111 nt, Pseudomonas aeruginosa PA01
ccgcccagcgacaugccgaggaaggucgagccgugguaggcguugauccgcgugaugacgugcuucuuggcgcgcuugccgcggcaguucugguaguagugcaugaggcgg

SEQ ID NO: 59191 - RNA, 57 nt, Pseudomonas aeruginosa PA01
ccgccccgccuccugggaccagccccggagggcuguccgagaugauagacggcgcgg

SEQ ID NO: 59192 - RNA, 86 nt, Pseudomonas aeruginosa PA01
ccgccgcgccgcgcaggcccggcuggcgcucggccuggcgcaugaucgccagcucgaccucggccggcucgaugcggaagccgcgg

SEQ ID NO: 59193 - RNA, 68 nt, Pseudomonas aeruginosa PA01
ccgccguguagcgagccgaugguuucauagcgaaugccuuugagcgcgugguucagcagcacauacgg

SEQ ID NO: 59194 - RNA, 65 nt, Pseudomonas aeruginosa PA01
ccgcacggcgaaggcgcacgcuggcaguccuaccuggaagcgcuggacgccuucuuccugcgcgg

SEQ ID NO: 59195 - RNA, 58 nt, Pseudomonas aeruginosa PA01
ccgcagaggucccucggcgcuuuuggcaacaagggcgaagaugccgccuucaucgcgg

SEQ ID NO: 59196 - RNA, 63 nt, Pseudomonas aeruginosa PA01
ccgcagccacagcggccgggcagccucuuccagggcggccaguuccucggccguuggcugcgg

SEQ ID NO: 59197 - RNA, 63 nt, Pseudomonas aeruginosa PA01
ccgauccgccgggugcacagcgaggguuucgugcguuuccugcagaacgccuggcaggacugg

SEQ ID NO: 59198 - RNA, 74 nt, Pseudomonas aeruginosa PA01
ccgaucgaggcgggucgccgaugugcuucggcgucgacgaugcggcagguggcgaagaccguggccucggucgg

SEQ ID NO: 59199 - RNA, 70 nt, Pseudomonas aeruginosa PA01
ccgaucggucucuggugaucagcggcuggccuugcgauaggcccccggcugcuguccgguggccuugugg

SEQ ID NO: 59200 - RNA, 82 nt, Pseudomonas aeruginosa PA01
ccgaugggcuucuccuggcugaccaggggcgagaagcccugcagcgggcucgccggguuggucagccaggcgcugucguugg

SEQ ID NO: 59201 - RNA, 61 nt, Pseudomonas aeruginosa PA01
ccgaggaacgcuccuggcaacugcgcuacgacuucgaccugcgcagcgucggcgugcccgg

SEQ ID NO: 59202 - RNA, 114 nt, Pseudomonas aeruginosa PA01
ccgaccccaggacaccgcgacccauggccgguugggcggcaagccugcgcgacaguggacugcuggcgcuggcagugccgcgcguguucgccggcauggagcgggacugggggg

SEQ ID NO: 59203 - RNA, 130 nt, Pseudomonas aeruginosa PA01
cccuuccagcggcugguugguguccagggucaggcgccgguagcgguccgugcccagcccggcgcccaggugggugaaggcuucggccuugggcugcuugcugaccauguugaugcugccgccgcuggug

SEQ ID NO: 59204 - RNA, 55 nt, Pseudomonas aeruginosa PA01
cccgguggcgauccccgcggugugcuucaccgauccggaagugguggucgccggg

SEQ ID NO: 59205 - RNA, 65 nt, Pseudomonas aeruginosa PA01
cccggccgccaccgucgagcaggcgcgcgaacgccugcaggaaaaguucgauuggcugcgccggg

SEQ ID NO: 59206 - RNA, 78 nt, Pseudomonas aeruginosa PA01
cccggcgcuucuucgccacccuggugcaggagguggucggccugcaccagcgccugcgcgaggaaaccgagcgcuggg

SEQ ID NO: 59207 - RNA, 55 nt, Pseudomonas aeruginosa PA01
cccggcgggcaccuguguggccgggaaacguuugccgcgccuggaccgcgccggg

SEQ ID NO: 59208 - RNA, 67 nt, Pseudomonas aeruginosa PA01
cccgccgagagcgccgagcaggaaugcgauagccagggucugccguaccgcgccgggcuccagcggg

SEQ ID NO: 59209 - RNA, 66 nt, Pseudomonas aeruginosa PA01
cccgcacagccguaucggccugcgccuccagcagcgccucggccauccggcuguacaucgcgcggg

SEQ ID NO: 59210 - RNA, 58 nt, Pseudomonas aeruginosa PA01
cccgagcugcucgaacuccacggucucgacgugccggccuggcgcgagaagcaucggg

SEQ ID NO: 59211 - RNA, 61 nt, Pseudomonas aeruginosa PA01
cccgauagccggcguccgccagggacuccgccaggucuuuccagguaugcgggcuguccgg

SEQ ID NO: 59212 - RNA, 67 nt, Pseudomonas aeruginosa PA01
cccucggccgcgccuuuggcauggcccgccugcgcgggcgcggcacggugcccggcgaugccgaggg

SEQ ID NO: 59213 - RNA, 94 nt, Pseudomonas aeruginosa PA01
cccugccgaccgccugggucggcgcgcugacccgcugggugccgcgcaucgagcgggcgccucggcgugcccugagcccucugguggugcaggg

SEQ ID NO: 59214 - RNA, 58 nt, Pseudomonas aeruginosa PA01
cccugccggugaucgccgcgccgcagccacagcagagcgucgcggacuaccugcaggg

SEQ ID NO: 59215 - RNA, 80 nt, Pseudomonas aeruginosa PA01
cccugcgcagcgcgaggccagccagcaacucuuggacgaagccgcggacaaguugccgccggccuuccgcgaacgccugg

SEQ ID NO: 59216 - RNA, 85 nt, Pseudomonas aeruginosa PA01
cccugcgggccgaucagcagguaccagggcagcucguugcgccagcgcucgcugcggccgcgguacaggcuggaggucuucaggg

SEQ ID NO: 59217 - RNA, 129 nt, Pseudomonas aeruginosa PA01
cccuggagaccuucgccgggccgcuugaaaucgcuaccuucccggcauccgcggcgggaccggaccugcgcgaacuggugcugggcucugagggacgcuucgggaucauuuccucggugaaggugcggg

SEQ ID NO: 59218 - RNA, 123 nt, Pseudomonas aeruginosa PA01
cccuggaucaggcccaugaauucguucaucagguugcgguggaaccauggcggacggaagguguucucggccaccauccagcgcggcgggaagaucacgaagucgauguuggccaggccgggg

SEQ ID NO: 59219 - RNA, 109 nt, Pseudomonas aeruginosa PA01
cccuggucucgcguuucaaugcgcugccggcgcaguccugcauggagcugccgcuaccgaugcuggaguugcugcgcuacggcggcgaguugucggaacagagccaggg

SEQ ID NO: 59220 - RNA, 77 nt, Pseudomonas aeruginosa PA01
ccgcggugggcgggagcgagccgguuguucgaggcgcugucgcgccugcgauuuccugcgcguuccguccugcccgg

SEQ ID NO: 59221 - RNA, 117 nt, Pseudomonas aeruginosa PA01
ccgcuagaggccgaguccuucgcuggcugcccagcgcgccaucaggcgguucgacggcaggcuuucgucgagcagcuugcgcgcgcuuuccacccccgcgaccggcaggcccugcgg

SEQ ID NO: 59222 - RNA, 64 nt, Pseudomonas aeruginosa PA01
ccgcuccguggugguggucuugcccgcgucaacgugggcacagauaccgauauuacgguagcgg

SEQ ID NO: 59223 - RNA, 61 nt, Pseudomonas aeruginosa PA01
ccgcugaugcucgccggccugcugcuguucaccuucggcuucuucggcgcgcacucggugg

SEQ ID NO: 59224 - RNA, 76 nt, Pseudomonas aeruginosa PA01
ccgcgacacuugucuugcgcucggugcggcuacuguauaaaaagcgcgccacccguugcgagagagccugucgugg

SEQ ID NO: 59225 - RNA, 95 nt, Pseudomonas aeruginosa PA01
ccgcgccagccgggcgccgaggaacuggcccuggccgccgcccugcucuaccaggccggcgccgaggccagugcgcaccagcccggccuggccgg

SEQ ID NO: 59226 - RNA, 100 nt, Pseudomonas aeruginosa PA01
ccgcgagauacgcgaggcgcugcuggcggcggaacaggcgccggaggcggagccggcgccccuggaagagccgccggaacccaggcgccagcggaagagg

SEQ ID NO: 59227 - RNA, 87 nt, Pseudomonas aeruginosa PA01
ccgcgaggaccucgggccauaccugcgccagccccgggcccugagcgcggagcguuugcgcgaggugcuggcgccgaggagccgcgg

SEQ ID NO: 59228 - RNA, 88 nt, Pseudomonas aeruginosa PA01
ccgcgcacgcccaggcggcgcgccucuuccagcagccagucgcagaucggcuggcccugguggcggcgccccugcugggugaugaagg

SEQ ID NO: 59229 - RNA, 59 nt, Pseudomonas aeruginosa PA01
ccggagcgcgccaccgccagcuucagcagcggcacgcuggcgcuggcgggcugcuccgg

SEQ ID NO: 59230 - RNA, 64 nt, Pseudomonas aeruginosa PA01
ccggaagcccugagccgcucugacugaagcagggugaggcgaggcggaucgggccguuuuccgg

SEQ ID NO: 59231 - RNA, 71 nt, Pseudomonas aeruginosa PA01
ccggcacagggucgggugcucagccggcgcgagacgauccugcugguccuguucgcccugacccugcacgg

SEQ ID NO: 59232 - RNA, 108 nt, Pseudomonas aeruginosa PA01
ccggcagcaggguguagaacucguacuucggcuuggccugggccggcgucugcguuugugcgggcugcugggccuggccguucugcugcggcugcuugcccugcacgg

SEQ ID NO: 59233 - RNA, 68 nt, Pseudomonas aeruginosa PA01
ccggcagcgcgccgauacccaugccggagaccaccgccucggucauggcgucggcgguguugaccugg

SEQ ID NO: 59234 - RNA, 83 nt, Pseudomonas aeruginosa PA01
ccggccagcccgcgcggcucgcugaaagccgagccgggccaggcgauggcgcggcugguagaugaccugcgccggguugccgg

SEQ ID NO: 59235 - RNA, 69 nt, Pseudomonas aeruginosa PA01
ccggcccgagcggccugccccgggcgcagccaacaggccacgccaggggcugcgccgcucagggcgcgg

SEQ ID NO: 59236 - RNA, 67 nt, Pseudomonas aeruginosa PA01
ccggccggcgccuguccgaccugcgacggccucggcgugaagcaauucuucgacgcgcgccgggugg

SEQ ID NO: 59237 - RNA, 124 nt, Pseudomonas aeruginosa PA01
ccggccggcuugucgcgggcggccgggucgugggcgggcacugucagggucaugcgcagguuuccaucggcgugauccccgcguugauaccccagcccggccgcgggacacaagccaggcgcgg

SEQ ID NO: 59238 - RNA, 63 nt, Pseudomonas aeruginosa PA01
ccggccugucuucugccggacagcccuguugucccgcuguugcccggcagacagucaggccgg

SEQ ID NO: 59239 - RNA, 60 nt, Pseudomonas aeruginosa PA01
ccggcugguagccggccggcaggcgcaggcgcgcgccggccuugagccggugccggucgg

SEQ ID NO: 59240 - RNA, 61 nt, Pseudomonas aeruginosa PA01
ccgggccgcgacggccgcccaggcacuccucgacguagcucugcuucggcuucuggcccgg

SEQ ID NO: 59241 - RNA, 69 nt, Pseudomonas aeruginosa PA01
ccggcgcgccagaacucgaccggucgcuacccguuacgcaggccggucgguacgcucuggcgcugucgg

SEQ ID NO: 59242 - RNA, 63 nt, Pseudomonas aeruginosa PA01
ccggcuccgccgguugcggcaucgccgaacagaucaucgccgccaugcaacuggagggccugg

SEQ ID NO: 59243 - RNA, 68 nt, Pseudomonas aeruginosa PA01
ccggcugcggguugucgcccuccggcugggcgcugaacaguaccgggccgccggcgauacgcuccugg

SEQ ID NO: 59244 - RNA, 85 nt, Pseudomonas aeruginosa PA01
ccggcgucuggcaacuguucuccgccggccgcucgcaggccauggccggcgugccggacuggguggugagugccgaggaugccgg

SEQ ID NO: 59245 - RNA, 81 nt, Pseudomonas aeruginosa PA01
ccgggcgcuucuccggcucgacgccggcgagguccuggccguugaggcggaucucgccgcuguccggcuggucgaagccgg

SEQ ID NO: 59246 - RNA, 64 nt, Pseudomonas aeruginosa PA01
ccgggcgauggagucguccgccgaacguagcgcgcggcuggcggaagaacucgaugacgcccgg

SEQ ID NO: 59247 - RNA, 75 nt, Pseudomonas aeruginosa PA01
ccggggucagcucggcgaugccgcaacugaaggugcagcgcaggucggucgguugcgccggguaguggaucucgg

SEQ ID NO: 59248 - RNA, 86 nt, Pseudomonas aeruginosa PA01
ccggguccugccgcgccaggcggcgcaggccgagaccgaccacgucggcgguggcauggucgcgcuggcugaagcggccggucugg

SEQ ID NO: 59249 - RNA, 74 nt, Pseudomonas aeruginosa PA01
ccgggucgaccaccauaccuaucgcuucgccgagaaggccgagcgcgaaggccugguggugauggacgacccgg

SEQ ID NO: 59250 - RNA, 88 nt, Pseudomonas aeruginosa PA01
ccggguuucgucaccgccgcgauccucggcuucgcccauaccgucggcgaguucggcguggugcugaugaucggcggcaacaucccgg

SEQ ID NO: 59251 - RNA, 66 nt, Pseudomonas aeruginosa PA01
cgucgcgaggccaucgagcaggccgccgcgauccgccugcggccaguacugaugaccaccgcggcg

SEQ ID NO: 59252 - RNA, 82 nt, Pseudomonas aeruginosa PA01
cgucggcaccggcaaacgguuuccagcauugccgucgaauucugccuggccggcgaaccuggcaacuggaugcugcucgacg

SEQ ID NO: 59253 - RNA, 129 nt, Pseudomonas aeruginosa PA01
cgucggccaggccggcuuccagcagcgggaucaggcccagcugggucgcggucggguagcagcccggcacggcgaucaggcgggccuggcggaucuucucgcgguucacuuccggcaggccguagacag

SEQ ID NO: 59254 - RNA, 56 nt, Pseudomonas aeruginosa PA01
cgucggcccauuccggguggucugccagcucggcgaacuugcggaacuggcugucg

SEQ ID NO: 59255 - RNA, 61 nt, Pseudomonas aeruginosa PA01
cgucggccucgcguugccagcggauggccaggacuuccaggccggcggcgcgagccaggcg

SEQ ID NO: 59256 - RNA, 82 nt, Pseudomonas aeruginosa PA01
cgucggcgacggcagcccgcugaagaugccgcgcggccucaacgcgcaauggaaucucggcggccugcacuaugcgccgccg

SEQ ID NO: 59257 - RNA, 62 nt, Pseudomonas aeruginosa PA01
cgucggcggccagcuucauccgcaggccgaacagcaaggccagcagcaaggccaggccgaug

SEQ ID NO: 59258 - RNA, 83 nt, Pseudomonas aeruginosa PA01
cguccgggucaacuccggcggcagcccgggcaacggcagcggcgcggcgccgcuguugccggggccgccgcucgacgcggaug

SEQ ID NO: 59259 - RNA, 61 nt, Pseudomonas aeruginosa PA01
cgucgagcagaccaaccgggcgcgcgaagacagcaugcgcuauuccgccuggaugcucgcg

SEQ ID NO: 59260 - RNA, 59 nt, Pseudomonas aeruginosa PA01
cgucgagccgggcgagggacucgucgaggucgucgagggccuuguaggccggaucgacg

SEQ ID NO: 59261 - RNA, 81 nt, Pseudomonas aeruginosa PA01
cgguuguucgccggggagcgcugguucgcccuggucgagcaacugcucgccggccugcggcgcuuccacgaagagcuaccg

SEQ ID NO: 59262 - RNA, 55 nt, Pseudomonas aeruginosa PA01
cgguucgaccaagaucgccaagcaacugauggucuaugccggcgagucgaacaug

SEQ ID NO: 59263 - RNA, 72 nt, Pseudomonas aeruginosa PA01
cgguggggcgccccugguccagcggcagcagguagagaucggggcgccgacgguccaggcgcgccaccagcg

SEQ ID NO: 59264 - RNA, 89 nt, Pseudomonas aeruginosa PA01
cgguguacaaggccucguuuuccggcgcgcugaagguccugcucgaccuguugcccgagcgcgcccuggagcacaagguggugcugccg

SEQ ID NO: 59265 - RNA, 91 nt, Pseudomonas aeruginosa PA01
cggugugcgcugcaucggcgcgccgaaggcgauauggccgauuucgaugacgccauccuucggcgugauccgcagguagcugagcaggccg

SEQ ID NO: 59266 - RNA, 80 nt, Pseudomonas aeruginosa PA01
cgucauccaguucgucgagggcucgggcgcagcgccaggcguaggcgucgucggccucguucucgaugaacaggcugaug

SEQ ID NO: 59267 - RNA, 65 nt, Pseudomonas aeruginosa PA01
cguagccgaugugcggguucagugcggugaccagcaucaggccgcgcuccagcaggucggccaug

SEQ ID NO: 59268 - RNA, 71 nt, Pseudomonas aeruginosa PA01
cguggagcgcgcgcugaaugccguggagcgccaggaacgccucugcggcagggguuugcgccugauccgcg

SEQ ID NO: 59269 - RNA, 89 nt, Pseudomonas aeruginosa PA01
cguggaagggcgccuggacaucgcccgggugaucuacaagaccgaccuguggagcgccugugggaucgucccggcgcgccuggucuacg

SEQ ID NO: 59270 - RNA, 97 nt, Pseudomonas aeruginosa PA01
cgugccgccguaaccgcagccuggcgaucgaagcgcaggaccaggcccugcucgcucuccccgaccgccagcaguugcggcgcagacgucggcagcg

SEQ ID NO: 59271 - RNA, 87 nt, Pseudomonas aeruginosa PA01
cguugucgcugaaacugcaugagcggcucgaccuggggaucgccguggacaccccggacggccuguucgugccggugcugcgcgacg

SEQ ID NO: 59272 - RNA, 61 nt, Pseudomonas aeruginosa PA01
cguugcguucggacagcccggccacgcucugcccgcggcucuucagcgucuggauguacug

SEQ ID NO: 59273 - RNA, 82 nt, Pseudomonas aeruginosa PA01
cguugcaccuggugagcgcgguaugcccggacuacucgcacuccagcgaugccgagggcaagccgcgcuacaccuucgagcg

SEQ ID NO: 59274 - RNA, 65 nt, Pseudomonas aeruginosa PA01
cguuccgacgaacaguugcgcagcgccuaugcggccgaggccgcacagcuccgcgacugggaacg

SEQ ID NO: 59275 - RNA, 64 nt, Pseudomonas aeruginosa PA01
cguucgaucaguugcggcuggccgagcugggcgccggcgagguugaccgacagcgggccgaacg

SEQ ID NO: 59276 - RNA, 78 nt, Pseudomonas aeruginosa PA01
cguucaucaaugccggcgcccuggugaucugcgacaucaaccagucgcguuucgccgcgccggcgcaaucgaugcgcg

SEQ ID NO: 59277 - RNA, 128 nt, Pseudomonas aeruginosa PA01
cuacgccgcaacaguucgucgauggcgccggucugggcgucggcgauggcgccgcgcgggaucaggaaggcgaugcgcggggcaucgcuggcccagcgcgaggcgccccaggccagguagucggcgag

SEQ ID NO: 59278 - RNA, 73 nt, Pseudomonas aeruginosa PA01
cuccaccaggcgccgcuugaugguuucggcggcauucugcgcggccuugccguucaggucggugcccgaggag

SEQ ID NO: 59279 - RNA, 81 nt, Pseudomonas aeruginosa PA01
cucgaccacccgccgcugguggucgacgucaacgaccccgaguauggcgaaggccgcccgguuggcgaacuggacuacgag

SEQ ID NO: 59280 - RNA, 129 nt, Pseudomonas aeruginosa PA01
cucgaccaggcccagaucagcgaccgccaccgcuugcgccggcagcuccacgaacugcgcaagcagcccgacgacgcgcgccuggcgcagugggucgagcgcuuccagaccuccugcgccaaggucgag

SEQ ID NO: 59281 - RNA, 63 nt, Pseudomonas aeruginosa PA01
cucgaccugcugccgaguauccuucccguggccgugucgcggcaggaggacggcagcgucgag

SEQ ID NO: 59282 - RNA, 72 nt, Pseudomonas aeruginosa PA01
cucgagagcggccugcgcuucggcgacauggacaucuuccaucgccacgaaagcauggccggcaauggcgag

SEQ ID NO: 59283 - RNA, 78 nt, Pseudomonas aeruginosa PA01
cucgaguucccgcuggcagauggcccugaccucgucuuccuggccaccggggccacgugccagcaggaguuccucgag

SEQ ID NO: 59284 - RNA, 78 nt, Pseudomonas aeruginosa PA01
cucgaugggacggucgagcagcacgucgagguucucgaaggcgacccggcgcagaugcgcgucgaucagucggucgag

SEQ ID NO: 59285 - RNA, 99 nt, Pseudomonas aeruginosa PA01
cucgcccggcacccgcuccaggccgccggcgaccugccaggacagcggcuugagcaacugguugcgcggggucagcgagcggauggugaccaggucgag

SEQ ID NO: 59286 - RNA, 65 nt, Pseudomonas aeruginosa PA01
cucgccgacccgcaugcccagcgagcggccgacgcaggcgacuuccagggagugggucaggcggg

SEQ ID NO: 59287 - RNA, 103 nt, Pseudomonas aeruginosa PA01
cucgccgguacggccgaagccgcagaucacuucgucggcgaugaacaggaugucguacuuggcgaggaucucgcggaucuucggccaguagguguccggcggg

SEQ ID NO: 59288 - RNA, 76 nt, Pseudomonas aeruginosa PA01
cucgcgccugcucagccugcggaccaucggccgcgcccucggccggcuguuguuucccaaggcggaacaggccggg

SEQ ID NO: 59289 - RNA, 120 nt, Pseudomonas aeruginosa PA01
cucggcgcuagcgguuucggcuaccagguggcgcgccaguucggccacgaggugcugccgacccgcgccgggcuggugccguucaccaucaccgaccagcugaaggagcugugcgccgag

SEQ ID NO: 59290 - RNA, 70 nt, Pseudomonas aeruginosa PA01
cucggucagguagccgccuuccucgaagccgacguagcccggaggcgcgccgaucaggcgggccaccgag

SEQ ID NO: 59291 - RNA, 70 nt, Pseudomonas aeruginosa PA01
cucgucggccgccgccgacuugucggugauggagaagaaccagauaccgacgaaggcgacgaucaucgag

SEQ ID NO: 59292 - RNA, 59 nt, Pseudomonas aeruginosa PA01
cucgucggccugcgcggcgaaugcggcgacgccgagggaaagugcgcaggccaggcggg

SEQ ID NO: 59293 - RNA, 97 nt, Pseudomonas aeruginosa PA01
cuccuugagcggagcgcccaucugcgacaucggcguaccgccgccgaacucggccuggagggucacgcugucguggcugagcaagccgcugaaguag

SEQ ID NO: 59294 - RNA, 61 nt, Pseudomonas aeruginosa PA01
cuaucaggccugggguagggagggcgacacgugggugucgcggaucagcgccaggggauag

SEQ ID NO: 59295 - RNA, 87 nt, Pseudomonas aeruginosa PA01
cuguuggggcugcccaccaccaggaccaugucgcacuggucggccaguuccuucacggcauccuggcgguucuggguggcauagcag

SEQ ID NO: 59296 - RNA, 107 nt, Pseudomonas aeruginosa PA01
cuguucggaggucagcuccagguagaugccggcggcuuccagcaagucggcgcugccgcucuugccggagaccgcgcgguuaccguguuuggcgaccuugccgccag

SEQ ID NO: 59297 - RNA, 57 nt, Pseudomonas aeruginosa PA01
cuguacuucgccgccaagcaggucgacaucguccagcgcagccaggacgaagagcag

SEQ ID NO: 59298 - RNA, 66 nt, Pseudomonas aeruginosa PA01
cugugggcggucaacgccagcaccggcaguuccgcgcagccgggcagcgcgcggaucgcccgacag

SEQ ID NO: 59299 - RNA, 68 nt, Pseudomonas aeruginosa PA01
cuggaggugcgcaggccgagcgguccgaggucgaccucgaggacauaggcggguuugcgugccuuggg

SEQ ID NO: 59300 - RNA, 68 nt, Pseudomonas aeruginosa PA01
cuggagucaggcucggugguuccgcugaaaccgaaacgcggguucagcggguugaggcugacgucgag

SEQ ID NO: 59301 - RNA, 95 nt, Pseudomonas aeruginosa PA01
cuggccaggucgcggguaucuucgcggcgaauuuccccggcagcgaaggccugcaugagaucguccgcguagacauagccuagacuuguacccag

SEQ ID NO: 59302 - RNA, 121 nt, Pseudomonas aeruginosa PA01
cuggcacagccgucgcggcaugcuggaacuggaugugcugcuggugccuuucgugcaggagguuuacccgggccuggacgccgaggaccaggcgcgcuuccgcaagcugcuggagugcgag

SEQ ID NO: 59303 - RNA, 107 nt, Pseudomonas aeruginosa PA01
cuggucgucgcggccaucgcggacuucgccggccaguugcuugagggucggauucaucgcucggcucccggcuggccgcugaacagcgcguccaggcguucgaucag

SEQ ID NO: 59304 - RNA, 58 nt, Pseudomonas aeruginosa PA01
cuggggcggcuuguugcgcccgcgggucucgacccgcgcgcggaucucgccgcgccgg

SEQ ID NO: 59305 - RNA, 60 nt, Pseudomonas aeruginosa PA01
cugggcgaucagcggccgcaggcaggcgaacggcgugcucagcggcccgggaucgagcag

SEQ ID NO: 59306 - RNA, 108 nt, Pseudomonas aeruginosa PA01
cuggccgccggcagccucggccuggucggccaucccggucccuggccggccuguccgcgcgcgguggagaagccggugacccuggcgaucggcccggaaggcggcugg

SEQ ID NO: 59307 - RNA, 84 nt, Pseudomonas aeruginosa PA01
cuggccugcacccgcggcuggcugcgcuaccguuugccgcagcgccuggugcggacccacagccagccgcugugcaucggccag

SEQ ID NO: 59308 - RNA, 78 nt, Pseudomonas aeruginosa PA01
cuggcgcguaccgucggcuggaucucgcacuggcaggaaaugcucuccggccccuacaagaucggccgcccgcgccag

SEQ ID NO: 59309 - RNA, 82 nt, Pseudomonas aeruginosa PA01
cuccccggugcgcgccuucaagagcgucggcggcaccccgcuguucuucaagcacgccgaaggcgccuauguacuggacgag

SEQ ID NO: 59310 - RNA, 92 nt, Pseudomonas aeruginosa PA01
cucugcaccugcucggccagauggcggaucagcgcgugcucaccguccaguuccaccgccgcgcgcugcagccacucggccaggugcagcag

SEQ ID NO: 59311 - RNA, 96 nt, Pseudomonas aeruginosa PA01
cucugguucaccugcaccacgccgcugcucccggcgaaggcgcgaucguccgucgagacgcugcguccccccgggaccggaguggccgaaccggag

SEQ ID NO: 59312 - RNA, 78 nt, Pseudomonas aeruginosa PA01
cucuucuucggcggccuguuccugcuguucaagagcaccauggagaucuaccacagccuggaaggcgcggaagaagag

SEQ ID NO: 59313 - RNA, 59 nt, Pseudomonas aeruginosa PA01
cugacggugaaggccggcggcagcuucauccggcucgacgcaagcggcaucgccaucag

SEQ ID NO: 59314 - RNA, 57 nt, Pseudomonas aeruginosa PA01
cugcaucggcggcggcgaggcgaccgcgaucgccgucgagcgcuugcgcugaugcag

SEQ ID NO: 59315 - RNA, 93 nt, Pseudomonas aeruginosa PA01
cugaucgacuucgccugcggcaugggcgacgugaugaagcagcguucgcugcuggugccgcgcgcccaugggcgggugcuggagaucggucug

SEQ ID NO: 59316 - RNA, 63 nt, Pseudomonas aeruginosa PA01
cugcugggccucccggcgcagacgacgcgccucuucuugcagguagcggcgccgggccagcag

SEQ ID NO: 59317 - RNA, 80 nt, Pseudomonas aeruginosa PA01
cugcuggugcgccugcucgguugccugcuggugcugcccuggcugacggcgcuggcgcaaccggccaacgcacucggcgg

SEQ ID NO: 59318 - RNA, 81 nt, Pseudomonas aeruginosa PA01
cuggaccaaccgcagcgaggcgucuggcacggcgaucuccaugaacggauugccgccgcgcgccucgauccacucggccag

SEQ ID NO: 59319 - RNA, 81 nt, Pseudomonas aeruginosa PA01
cuggaacagacgccgcccuccagcggccgcaaccagggcgagcuggaguucgccgggcgccgcugggaguggcgcacccag

SEQ ID NO: 59320 - RNA, 63 nt, Pseudomonas aeruginosa PA01
cuggaagaaggugcggacgagguauucgaggaaauccucgccgccgcuacguccuacuuccag

SEQ ID NO: 59321 - RNA, 81 nt, Pseudomonas aeruginosa PA01
cugcuccggcagcgaccaguccgccagggccgccggcccggaggccggggccgcaucggcgggcaggucgaggccggagag

SEQ ID NO: 59322 - RNA, 83 nt, Pseudomonas aeruginosa PA01
cugcucgaggagcgcccggcgaugcgcgcuugccggcgcguggaaaagacggcgagcgcuuccugaggcgcguagcagagggg

SEQ ID NO: 59323 - RNA, 81 nt, Pseudomonas aeruginosa PA01
cugcgccgccuuggccgcgcccugcggggugaucgguccguuguugccgaucaggccgcaggcguggcccucgaugcgcag

SEQ ID NO: 59324 - RNA, 76 nt, Pseudomonas aeruginosa PA01
cugcgcgagcagggcgugcgcccggcgaauuucuacuacgaaaaguucgcugccagcgcggccugaacccgagcag

SEQ ID NO: 59325 - RNA, 57 nt, Pseudomonas aeruginosa PA01
cugcgcgccaauggcgauccgaagcugaaccgccuggcggaugucgacggcccgcag

SEQ ID NO: 59326 - RNA, 90 nt, Pseudomonas aeruginosa PA01
cugcgggcauugcgacaacugcguggacggcguggaaaccugggaugccaccgaauccgcgcgccaggcgcugucggcgaucuaccgcag

SEQ ID NO: 59327 - RNA, 69 nt, Pseudomonas aeruginosa PA01
cugcgugcggcgccggcgaugccggccagggagacggcucccaauacggcgaccagcgccgccaggcag

SEQ ID NO: 59328 - RNA, 60 nt, Pseudomonas aeruginosa PA01
cugccgcccaguugccgccagagccgcgccgagcggaugccggcgagcagcagggcgcgg

SEQ ID NO: 59329 - RNA, 82 nt, Pseudomonas aeruginosa PA01
cugccagggcaugcgcggcuggucggcggccagccgggcguuguccggcgaggccaauggcugaggcgcuucguccagguag

SEQ ID NO: 59330 - RNA, 87 nt, Pseudomonas aeruginosa PA01
cugcgacucgccgaagcccuggaacaccugcagcagcaacggcagcgccaacaggaugaguuccagcgccuucaggccgacuggcag

SEQ ID NO: 59331 - RNA, 64 nt, Pseudomonas aeruginosa PA01
cugccgcuguucggugccuacaagcguggucucaucgccacccagaaagcgcuggauacggcgg

SEQ ID NO: 59332 - RNA, 65 nt, Pseudomonas aeruginosa PA01
cugccggccaggcggguguucagcucgaacuugccgaggguguuggcaucggccauggccggcag

SEQ ID NO: 59333 - RNA, 64 nt, Pseudomonas aeruginosa PA01
gagcagcuggaucgggcgccgcgcccugcgcgccaagggccaggccucgucgcucuaucuguuc

SEQ ID NO: 59334 - RNA, 78 nt, Pseudomonas aeruginosa PA01
gagcaccuugggcaaagucugccgcacuacauguugccgucggcguucgugguccuggcggagcugcccaagacgcuc

SEQ ID NO: 59335 - RNA, 78 nt, Pseudomonas aeruginosa PA01
gagcacuucguaggccugcggaucggugaccuucuucggcuugccgcgcuugucggucucguaggcguagaagcccuu

SEQ ID NO: 59336 - RNA, 59 nt, Pseudomonas aeruginosa PA01
gacgacccgcucgagcgucucuacgccgggcucuucggcgcgcucggggugggcuuguu

SEQ ID NO: 59337 - RNA, 63 nt, Pseudomonas aeruginosa PA01
gaccgcccagaugaggggaagaucgauacccaugucucaguuccucuuguccuggucgcgguc

SEQ ID NO: 59338 - RNA, 73 nt, Pseudomonas aeruginosa PA01
gacgcuccggccaaccgccacggaucgccuugaucaccgcggcgacuucgcgcggaugguggccguaaucguc

SEQ ID NO: 59339 - RNA, 63 nt, Pseudomonas aeruginosa PA01
gacgcuggcuaacccgccauagcuggaauggcgguaauaaugcugcggcggguaagcaggguc

SEQ ID NO: 59340 - RNA, 81 nt, Pseudomonas aeruginosa PA01
gacgcugguggugaacggugugagcaugccacugaagguggacgccgauggcagcuucgaccgcccguucgccuucccguc

SEQ ID NO: 59341 - RNA, 66 nt, Pseudomonas aeruginosa PA01
gacgugccggggcaacgcaccagccaucucgacaucacgcucggcgcgcaggccaucggcaucguc

SEQ ID NO: 59342 - RNA, 60 nt, Pseudomonas aeruginosa PA01
gacgucgccgcguuacgccaggacccgcaacugacggugcuggaagaagcggcgaugauc

SEQ ID NO: 59343 - RNA, 69 nt, Pseudomonas aeruginosa PA01
gacuaaucguucacauuugacuuaacuaguggccaaaugcuggcugcuuauuagaaauaggcauuaguc

SEQ ID NO: 59344 - RNA, 60 nt, Pseudomonas aeruginosa PA01
gacucccgugccgaucagccauugcgccaggcucgcguugaggcugccgguaacgggguc

SEQ ID NO: 59345 - RNA, 81 nt, Pseudomonas aeruginosa PA01
gacaugcggguggucggccaggugcgcgguggcccuggccauguggguggacagcgcgcgguuggccucgaucaccuuguc

SEQ ID NO: 59346 - RNA, 70 nt, Pseudomonas aeruginosa PA01
gaccggauggcgucggccgcagaugaacucgaggauaccuuugagcguggccagccgcgccucucugguc

SEQ ID NO: 59347 - RNA, 76 nt, Pseudomonas aeruginosa PA01
gaccuccaccaguccgggagcgauggcguugacggugaugccgucgccgcccagcucgcgggccaggcugcggguc

SEQ ID NO: 59348 - RNA, 73 nt, Pseudomonas aeruginosa PA01
gaccugcaaggugccuugcucaagcucggccuggccuucgacgggcaacuggagcgcggcaacuggcgcgguc

SEQ ID NO: 59349 - RNA, 79 nt, Pseudomonas aeruginosa PA01
gaccugccaggccagcgggucgcgccacaggccgaugacacggaaggccuggcgaugggcgugcuggcccuggcggguc

SEQ ID NO: 59350 - RNA, 75 nt, Pseudomonas aeruginosa PA01
gaccagcagcggcacgcgcgcggccaucucgaaccagugcaucuuguaccagaggccgcgcucgccgagcauguc

SEQ ID NO: 59351 - RNA, 55 nt, Pseudomonas aeruginosa PA01
gaccagcgccaggccggccccagccuccaccagggcgcgggcgagggcguagguc

SEQ ID NO: 59352 - RNA, 66 nt, Pseudomonas aeruginosa PA01
gaccaggcugccggcaccggccuugaccaggcugcccugguacuggcgcugggcggcggccugguc

SEQ ID NO: 59353 - RNA, 90 nt, Pseudomonas aeruginosa PA01
gaccccagaagcggaccuggccgacgagaggcugacugcgggagguuuccuuuccggcgggcagccgcuguggaaggcauucuggcuguu

SEQ ID NO: 59354 - RNA, 63 nt, Pseudomonas aeruginosa PA01
gaccccguccggaccgaucaggccgaccaugcgguuggccgggaucuccaggcugacgucguc

SEQ ID NO: 59355 - RNA, 57 nt, Pseudomonas aeruginosa PA01
gaaugggagcugggccugcaggugaucccggagaaccagcaggacagcuucgacuuc

SEQ ID NO: 59356 - RNA, 80 nt, Pseudomonas aeruginosa PA01
gaaugggggccagcagggcuucugcggcgaucuucuccgggccuuccaggggcaggcugucgcggaagaucgggccuuuc

SEQ ID NO: 59357 - RNA, 61 nt, Pseudomonas aeruginosa PA01
gaauggguguucugccauccggagguggaaacccuggaauugcagggcuaccgcaucauuc

SEQ ID NO: 59358 - RNA, 65 nt, Pseudomonas aeruginosa PA01
cuguuuuccgccggcaucggccugcacaccuucuaccuuggccugcagaaggucggcggcgacag

SEQ ID NO: 59359 - RNA, 70 nt, Pseudomonas aeruginosa PA01
cuucuucagcuugaucacgucgaacaguuggcagaccgcuucauccuugucgcugaucagcucgaagggg

SEQ ID NO: 59360 - RNA, 88 nt, Pseudomonas aeruginosa PA01
cuucuucuucguggcguucuggcguagcgacaauccguucauggcgcagcacuggguggaaaucgccacgguggacuacggagugaag

SEQ ID NO: 59361 - RNA, 62 nt, Pseudomonas aeruginosa PA01
cuucccgucgucucgucggucacagcuggaaagggcggcuggccgagcgauucggcgggagg

SEQ ID NO: 59362 - RNA, 59 nt, Pseudomonas aeruginosa PA01
cuuccgccccggcggcgcgggcaccggccauguccuugaugucgccgccggcgcagaag

SEQ ID NO: 59363 - RNA, 58 nt, Pseudomonas aeruginosa PA01
cuugaccacgauugcgcccaggaagcugccguccucggcgcgcaccgcgugggacagg

SEQ ID NO: 59364 - RNA, 59 nt, Pseudomonas aeruginosa PA01
cuucugcgccggcggcgacaucaaggacauggccggugcccgcgccgccggggcggaag

SEQ ID NO: 59365 - RNA, 100 nt, Pseudomonas aeruginosa PA01
cuugaugucgaucacccggaugcuggcgaaguagccgcugucgaagaucgagcugaccaucaguugcaccaucgccgggucguccacguguggcgucagg

SEQ ID NO: 59366 - RNA, 100 nt, Pseudomonas aeruginosa PA01
cuugcagcuuuccaggugcaccaccaugcccuugccggcggacagguggccaacgaucgggucgccgggaaucggcgugcagcacuuggcguagcucagg

SEQ ID NO: 59367 - RNA, 129 nt, Pseudomonas aeruginosa PA01
cuugccgugugccgucaagggcaaggccucgacccggacgcaggcaugcgggcgcugccaggugggcaguuggcggagcagggccugcgggcuggcgucggcuuuucccguccaggcgcagagcaguug

SEQ ID NO: 59368 - RNA, 130 nt, Pseudomonas aeruginosa PA01
cuuggcucgcuggagcgccucggcgucggcgacgccgaccuggaugucauugcggcccuggacgaucagggucgggaugcgcaggcggccgaacgcgcgggccgggucuucgcggaacagcgagaucagg

SEQ ID NO: 59369 - RNA, 82 nt, Pseudomonas aeruginosa PA01
cuuugcgccgccggcauguccggcucccagccuucggcgaucaaggcccagggccccuuccacggaccgcugguggccgaag

SEQ ID NO: 59370 - RNA, 87 nt, Pseudomonas aeruginosa PA01
gaaaacgccgcuggcgccgaggcaggcguggaccuucucgaacaggccgggcaggucggcuucggcuucgauguugucgguguauuc

SEQ ID NO: 59371 - RNA, 99 nt, Pseudomonas aeruginosa PA01
gaaaagaaaaccuugcuagagacagaagggcgggcugccugccggacgcuucccgcauccggcggacagcccgccccagguagucgguaucagucgauc

SEQ ID NO: 59372 - RNA, 83 nt, Pseudomonas aeruginosa PA01
gaaggcuugggagcgggcuccagcggcuugccgcacucggcgaacagcagcagcggagcgacccgcagguauuccaugacuuc

SEQ ID NO: 59373 - RNA, 73 nt, Pseudomonas aeruginosa PA01
gaagggcaagguggccaagcuggucugccccuaccaccaguggaccuacgagcuggauggccgccugcuguuc

SEQ ID NO: 59374 - RNA, 60 nt, Pseudomonas aeruginosa PA01
gaagugcugcgcaucgaaggcucgaucuucuucggcgccugcgacuaccugcaacgccuc

SEQ ID NO: 59375 - RNA, 90 nt, Pseudomonas aeruginosa PA01
gaaggugaucggcgccgugggcagcgcggccaucgccuggcgcaccgccggaucggcgagguagcgcagcacgccguagccgaggccuuu

SEQ ID NO: 59376 - RNA, 112 nt, Pseudomonas aeruginosa PA01
gaaguucuccgccacccaguacgccaugcucagcucgaccaugcuccugcugccgcgcuucaucggcggcuacuccggaaccauggucgagagccucggcuacgagcacuuc

SEQ ID NO: 59377 - RNA, 55 nt, Pseudomonas aeruginosa PA01
gaagugggcugggccguuggucugaaauacaccgagggcuucagcaagccgcuuc

SEQ ID NO: 59378 - RNA, 60 nt, Pseudomonas aeruginosa PA01
gaagagcgccgccagcgucacaguccgaugaaggacgucggcggcaugcugcgcucguuc

SEQ ID NO: 59379 - RNA, 81 nt, Pseudomonas aeruginosa PA01
gaagcccagcggguugaugucguagcucaccagcagguucuuggucugcugguaguggucgagcaucaucuugugcgucuc

SEQ ID NO: 59380 - RNA, 106 nt, Pseudomonas aeruginosa PA01
gaacacgcucgagcggacccuggccugccugcgcgagggcagcggggaaaucuucgucgacccggcguugaucccgcgggcgguccguccgcucaagcgcaugcuc

SEQ ID NO: 59381 - RNA, 58 nt, Pseudomonas aeruginosa PA01
aaggaugcgccagcggcaaccagggcaucugcucguggaagauccgcugcgcuuccuu

SEQ ID NO: 59382 - RNA, 76 nt, Pseudomonas aeruginosa PA01
aagucgaggaucucgccgggcuucaggcucagggugugcucgcccugcaggcggaacuccggcgcgucgucgaguu

SEQ ID NO: 59383 - RNA, 89 nt, Pseudomonas aeruginosa PA01
aacagcauccauggacgcaccccgggcacccugacggcuuguggcaagccggcgcagcauggccuggagggauucgccagggugccguu

SEQ ID NO: 59384 - RNA, 90 nt, Pseudomonas aeruginosa PA01
acggggugaucuucagcgccggcuacuauccuucgcggccgcgccgcuggcaggaggaaguggccagcgcgcugggccagaccaacccgu

SEQ ID NO: 59385 - RNA, 82 nt, Pseudomonas aeruginosa PA01
acggcggcgccggucucuccggcggccagcgccagcgcaucggccuggcccgcgcgcuguacgggcgaccggcgcugaucgu

SEQ ID NO: 59386 - RNA, 61 nt, Pseudomonas aeruginosa PA01
acgguugagaauggucuccuuggccugguucagcgccaccaccaccuugccguucugccgu

SEQ ID NO: 59387 - RNA, 130 nt, Pseudomonas aeruginosa PA01
acuacggcgaccugcgcgacaucaucgcgcggcgcuucgaggagggccgggugaucagcgucgguccggacgacacccugcucaccgccuuccagcgcaugcgccuggccgacguuucgcaauugccggu

SEQ ID NO: 59388 - RNA, 91 nt, Pseudomonas aeruginosa PA01
acgaagguguagccggggcgggugacgccguugucgaugcgcgugcuggcauugaccgugacgucgccggcggccuggaucaccgcugcgu

SEQ ID NO: 59389 - RNA, 68 nt, Pseudomonas aeruginosa PA01
acgcaggccggcgaggcguggccgacacggaucaccugguucggcucgcccuugccgcaguagggcgu

SEQ ID NO: 59390 - RNA, 62 nt, Pseudomonas aeruginosa PA01
acccuguccggcggcgaagcccagcgcauccgccuggccagccagaucggcgccggccuggu

SEQ ID NO: 59391 - RNA, 71 nt, Pseudomonas aeruginosa PA01
accgcggcgcgcucggaacccgguuuggccaggguggcccggccgauccggaucgggcgccuuccauaggu

SEQ ID NO: 59392 - RNA, 94 nt, Pseudomonas aeruginosa PA01
accgcuauccgaucaagucuuccgccgccgagucccuggagcgugucgcgcucgaugcgcugggcguggucggcgaccgacgcuggauggcggu

SEQ ID NO: 59393 - RNA, 79 nt, Pseudomonas aeruginosa PA01
accccauggcugcugugcgccagccccaacgcacgcaacgccucgaucaggcgcuggcgcaacggcucgucauaggggu

SEQ ID NO: 59394 - RNA, 82 nt, Pseudomonas aeruginosa PA01
acccucgaagccgagcugccggcggauggcggguugcucaugaacugccggcugccgcucgccgccggcgccacgggagggu

SEQ ID NO: 59395 - RNA, 65 nt, Pseudomonas aeruginosa PA01
acccucguggccuggcguccgcaggacggagacccgguccggcggaagcaggucggcgcgggggu

SEQ ID NO: 59396 - RNA, 56 nt, Pseudomonas aeruginosa PA01
accaggccgccgccuuccucgucgcaggcgaucggcgagaagucggucagcuuggu

SEQ ID NO: 59397 - RNA, 79 nt, Pseudomonas aeruginosa PA01
accacgccagcgccccggugccgccguggaaggauggcgucggccuuuccacggucagcaccgccggcgagaucgaggu

SEQ ID NO: 59398 - RNA, 83 nt, Pseudomonas aeruginosa PA01
accagauggccgacgccguagcgcuggccgcugcgguagaucgccgacagcgccuggcgcgcggauucgguggcaucccaggu

SEQ ID NO: 59399 - RNA, 69 nt, Pseudomonas aeruginosa PA01
accacgagcgcgagcugucgaccaaggagaucuucgucaccuacgugcugcgcaacaagcugcucuggu

SEQ ID NO: 59400 - RNA, 83 nt, Pseudomonas aeruginosa PA01
acagcauguucaggcccccuggccggccgccaggaccggcugccgcugguccugcgcgcugcgcaggguccgccagguguugu

SEQ ID NO: 59401 - RNA, 67 nt, Pseudomonas aeruginosa PA01
aguucugggagcuggagaaccucggccugccgcugcucggcguacuguucauccaggucgcggugcu

SEQ ID NO: 59402 - RNA, 73 nt, Pseudomonas aeruginosa PA01
aguucgucgcgguccugggggaagccggcgaccgucuccaggucaccggucuccgccgggcgguggcugagcu

SEQ ID NO: 59403 - RNA, 100 nt, Pseudomonas aeruginosa PA01
aguuccucaaccugcugcuggcgaacccggccggcgaugcaguggagcaccugaaggugcccaccgguuuccuucgccagcagcaggacagccuggaacu

SEQ ID NO: 59404 - RNA, 105 nt, Pseudomonas aeruginosa PA01
aggugaguacgucuuccucggacuuggccagguugccgaucucgcugcgcagcuuguucagcuccggcuugaucaggucggccgggcgcacgucgaugacuuccu

SEQ ID NO: 59405 - RNA, 61 nt, Pseudomonas aeruginosa PA01
aucacggcauaggcuucggugaacaucgcccggucggugagcagcucggucugugccgggu

SEQ ID NO: 59406 - RNA, 62 nt, Pseudomonas aeruginosa PA01
agggugcgcacgaagggcaccaugaucucgacguuggucaggcccauuucguugcggaccuu

SEQ ID NO: 59407 - RNA, 61 nt, Pseudomonas aeruginosa PA01
aggucggcgcgcugcuguucgucgacauggcccacgucgccgggcuggucgccgccggccu

SEQ ID NO: 59408 - RNA, 88 nt, Pseudomonas aeruginosa PA01
aggucgaguuucggcgccucggcuucggccuuggcguccuguaggucggcgccuaccggagccaggccgaaauccggcgcaucgaccu

SEQ ID NO: 59409 - RNA, 55 nt, Pseudomonas aeruginosa PA01
aggccgaguugcgccaggacgaagacguucucgacaccugguucagcuccggccu

SEQ ID NO: 59410 - RNA, 63 nt, Pseudomonas aeruginosa PA01
aggaggcgucggcgucgcccgcggcuaccugaaccggccggagcugaacgccgagcgcuuccu

SEQ ID NO: 59411 - RNA, 64 nt, Pseudomonas aeruginosa PA01
aggcgcgccaggucggacagguucucgcggcccagcaacggcacgcgccauccgccggcgcccu

SEQ ID NO: 59412 - RNA, 66 nt, Pseudomonas aeruginosa PA01
aggcgcugguggucgauccgggcaaggaagccuucguccguugccugggcugcaccaccagcggcu

SEQ ID NO: 59413 - RNA, 78 nt, Pseudomonas aeruginosa PA01
aggccaacgcgccgaccuuccauggcgcgcugguggacgccgccuacgccgagcgcuauccggagguggugguggccu

SEQ ID NO: 59414 - RNA, 87 nt, Pseudomonas aeruginosa PA01
aggcccacggccagggcuacggcgagcguaccgagggacacugggaguauccggugcgccugccguuccugauccgcgcgguggccu

SEQ ID NO: 59415 - RNA, 61 nt, Pseudomonas aeruginosa PA01
aggcccuggaucucgcccugccagugcuucuccaccacuucggccauggcuccggcggccu

SEQ ID NO: 59416 - RNA, 76 nt, Pseudomonas aeruginosa PA01
aggaugccugccucagcccgaacgccucguucgccuggguggaagagugcgccguuggggugaaacuggcgauccu

SEQ ID NO: 59417 - RNA, 69 nt, Pseudomonas aeruginosa PA01
agggccgggcgacgaacuggacgccgagaucgcggaaauccucggccguccggacgacgacccggcguu

SEQ ID NO: 59418 - RNA, 100 nt, Pseudomonas aeruginosa PA01
agggccugccgcagccggaugcgagccuguugcagcaggucuacguggcgccgcgaagcgaucuggagcaacaggucgcggggaucugggcggagguccu

SEQ ID NO: 59419 - RNA, 70 nt, Pseudomonas aeruginosa PA01
agggcgagcaggccguugccggacagugcgcgcucggcggagacauguccguagcgcgccugcaggcccu

SEQ ID NO: 59420 - RNA, 121 nt, Pseudomonas aeruginosa PA01
agggcuggcugcuaggcacccagucgcaccuggauuuuuugccggaaagccacaccgacuuuaucauugcgguccucggcgaggaguucggccuggucggcgucugccugcugcuggugcu

SEQ ID NO: 59421 - RNA, 86 nt, Pseudomonas aeruginosa PA01
agggagcugcucuccagcaccgcccggcgcgguucgcgcaaacggcgcuggagcggcgccagcaggugauggauggacagcucgcu

SEQ ID NO: 59422 - RNA, 59 nt, Pseudomonas aeruginosa PA01
aggcuuccuucaacuugucgccuggauagucauaggcgcucuggucguaggggaaggcu

SEQ ID NO: 59423 - RNA, 60 nt, Pseudomonas aeruginosa PA01
acuugcucggccagcucgggcugcuggugucaccggcggcgcgggucuggcugagcacgu

SEQ ID NO: 59424 - RNA, 77 nt, Pseudomonas aeruginosa PA01
agcacaucgggaccgacgccacgcgcuaucaggcagugagccagacgauuggcgcgggcguugagcucggcguagcu

SEQ ID NO: 59425 - RNA, 85 nt, Pseudomonas aeruginosa PA01
agagccagcgccuggagcuggaagugcucgcggugcugccgcaggagcguuucgcccgcgacgcgcuguucgccccgcuggcccu

SEQ ID NO: 59426 - RNA, 55 nt, Pseudomonas aeruginosa PA01
agcugcuggucaccauccucggcgccuggcgccugggcgcgguguaccagccgcu

SEQ ID NO: 59427 - RNA, 71 nt, Pseudomonas aeruginosa PA01
agcugggugaucgcccgcgagcugccgauccgcgccgaauccaggcgguccaggcgcgggcccauccaguu

SEQ ID NO: 59428 - RNA, 97 nt, Pseudomonas aeruginosa PA01
aggacuucgacaagagcgccggcuucggcgucuucucgcucaacggcgccuaccgggugacucgcaacgucaagcugagcgccggugucgauaaccu

SEQ ID NO: 59429 - RNA, 77 nt, Pseudomonas aeruginosa PA01
agcgguuucgaggcuacgaccgauuucagccgugucagugaaugugaugcccugauccuuugugugccgacgccgcu

SEQ ID NO: 59430 - RNA, 130 nt, Pseudomonas aeruginosa PA01
agcgucucgacaagccguuccuggaaggcgccgaggcgcgcgggcugcucaaccugaaaggccaccgcucggucggcggcaugcgcgcuuccaucuacaacgcccuuggccuggacgcggucgaggcgcu

SEQ ID NO: 59431 - RNA, 103 nt, Pseudomonas aeruginosa PA01
agcgcgcgcugacccuggcuaccgccggcgccacggucgagcgccaggcaccggacuggcgcgcgcgguugcuggcggugcucaccgaucccagcguggcgcu

SEQ ID NO: 59432 - RNA, 60 nt, Pseudomonas aeruginosa PA01
agcgcggcggguauugcgacaugacuuucugcaccgucucgcggaucgccugcucgcgcu

SEQ ID NO: 59433 - RNA, 57 nt, Pseudomonas aeruginosa PA01
agcgcugcgaccagucgguagccacccaguccuugagccauccguucucgcggcgcu

SEQ ID NO: 59434 - RNA, 87 nt, Pseudomonas aeruginosa PA01
agcggaucaccggauaggagaaguccgaggcgauuucauuggcguagcgcagugcgaugccuucggccuuuuccugggauauccguu

SEQ ID NO: 59435 - RNA, 56 nt, Pseudomonas aeruginosa PA01
agcggcgcggugguuggcgugcucgacgacggucggcgcggcagccgcuggcuguu

SEQ ID NO: 59436 - RNA, 55 nt, Pseudomonas aeruginosa PA01
agcggcgugcgcagcucgugggagacguuggccacgaaauccuugcgcaucugcu

SEQ ID NO: 59437 - RNA, 67 nt, Pseudomonas aeruginosa PA01
agcgaugcgcggcguuuccucgccgaaguggauuccgcuucggugauggucaacgccucgacccgcu

SEQ ID NO: 59438 - RNA, 57 nt, Pseudomonas aeruginosa PA01
agcgcagcaggcaggccugguagaucgccucauggggcggcuugccuucguugcgcu

SEQ ID NO: 59439 - RNA, 60 nt, Pseudomonas aeruginosa PA01
agcaggucgagcaguaccgcgcugccgacgaggccaagcgcggcaagauguucggcuucu

SEQ ID NO: 59440 - RNA, 67 nt, Pseudomonas aeruginosa PA01
agcaggucguggccggccagggucaggugguggaccacccauugcuccuggccgguccaggaaugcu

SEQ ID NO: 59441 - RNA, 72 nt, Pseudomonas aeruginosa PA01
agccgccgucucggccagcagggcgcggcggaauucaccgaccaggucguccugcgccgaaccgcugcggcu

SEQ ID NO: 59442 - RNA, 86 nt, Pseudomonas aeruginosa PA01
agcccuccuucgccgccaccuggcuggugccgcgccucggucaauucagcgcgucgcacccgcagguggaaguccgcguggaggcu

SEQ ID NO: 59443 - RNA, 62 nt, Pseudomonas aeruginosa PA01
caccuggcugcucaacucggcgaagcgcugcgcgucguugcccgguugcagcggcaccaggg

SEQ ID NO: 59444 - RNA, 84 nt, Pseudomonas aeruginosa PA01
caccugguugaggucgagcgccugcaggcgccgcuggcccuugcgcaggaaggcgcgcaggcgcuugaucaccuccgccgcgug

SEQ ID NO: 59445 - RNA, 83 nt, Pseudomonas aeruginosa PA01
cacggcgcccggcgaagucucgcggccgcugucgaagccugcggguugcgucucggccggcggcgcuucggcgggcagccgug

SEQ ID NO: 59446 - RNA, 57 nt, Pseudomonas aeruginosa PA01
cacuggagcagcgccuggaucggcuacucgcuggcccucuacggcgugcucgcggug

SEQ ID NO: 59447 - RNA, 55 nt, Pseudomonas aeruginosa PA01
caccgucgccuggcccagcggcgaguucggcgccaugggccuggaaggcgcggug

SEQ ID NO: 59448 - RNA, 96 nt, Pseudomonas aeruginosa PA01
caccggcgccugguagucgagcagguagucgccgcgcccgaguucgagcaugcgcaaggcggcguggugggugccggugcgguacaggcgcaggug

SEQ ID NO: 59449 - RNA, 62 nt, Pseudomonas aeruginosa PA01
cacuggccgcaucgcugaaggaacagcccgacgggcgcgccuucuucagccugcgcgccgug

SEQ ID NO: 59450 - RNA, 120 nt, Pseudomonas aeruginosa PA01
cacuucaugcagcaggccugugcgcagauccagcgcccggugugccggcuggcgccgggcaccuacccggcgcugcugagcaaccgcuggccgggcaacgugcgccaguugcagaacgug

SEQ ID NO: 59451 - RNA, 79 nt, Pseudomonas aeruginosa PA01
auuucauggaggcgagcgguucgcgggaaaggucgcgagcaacgcaccuucggaccgacccucgcugcguccaugaagu

SEQ ID NO: 59452 - RNA, 104 nt, Pseudomonas aeruginosa PA01
caacugguccaugaucauccggaagugcugcauagcucacguuucucccgguucucccuggcgcucgcgguacggagccggcccugccgguugaggaucaguug

SEQ ID NO: 59453 - RNA, 57 nt, Pseudomonas aeruginosa PA01
caacugcgcgacgccgcggucggacgcuuccugggucagcgccggaucgugcaguug

SEQ ID NO: 59454 - RNA, 130 nt, Pseudomonas aeruginosa PA01
caagcccucgcagcucuccggcggccagcagcagcggguggccaugggccgggcgcuggcgcggcggcccaaggucuaccuguucgacgagccgcuguccaaccucgaugccaagcugcggguggaaaug

SEQ ID NO: 59455 - RNA, 130 nt, Pseudomonas aeruginosa PA01
caagcgccucggcguuucgcauaccacggcggcgaacaagcugcgccagcauggcguggggcaaagcgagggcugagcggcaugcuugccgguuuguugcaggcugggaaagaaacgguggaggcgucgg

SEQ ID NO: 59456 - RNA, 112 nt, Pseudomonas aeruginosa PA01
aucucgcgcugcuggaagacccgggucugcuggacgccgccgacaugcugaucgaccagggcgucggcgccgcccacgccuggcaccgggcgauccaggcccagugcgagau

SEQ ID NO: 59457 - RNA, 95 nt, Pseudomonas aeruginosa PA01
aucgacaaccgcgcccucagccugcugcucgccuacgcccagggcggccacacgcucagcgccggcuggcagcggaugaacggcgccagcucgau

SEQ ID NO: 59458 - RNA, 65 nt, Pseudomonas aeruginosa PA01
auccgcacgaucagguugaggcggcccggaucguuguccggguugagaauaucgaucaggcggau

SEQ ID NO: 59459 - RNA, 61 nt, Pseudomonas aeruginosa PA01
augccgaccuggcugcuggcggggccgggaaggaacuggcagagggcgaccaggucggcgu

SEQ ID NO: 59460 - RNA, 70 nt, Pseudomonas aeruginosa PA01
augccgcaggcauuggaagugucgguugaagauauaacgcgagccacauccaguugcaugccauaggcau

SEQ ID NO: 59461 - RNA, 56 nt, Pseudomonas aeruginosa PA01
augaccgacggccccgccgacuacaucgacgagaugcuccggcugaucgucggcau

SEQ ID NO: 59462 - RNA, 68 nt, Pseudomonas aeruginosa PA01
auguucuccugcggcaugggugcguucaucgccggcaacgacggacgcacuucgcugcgggucggcau

SEQ ID NO: 59463 - RNA, 55 nt, Pseudomonas aeruginosa PA01
augucuuauguucggcgucgcgcuguauucauuuggccggcaucuuauggggcgu

SEQ ID NO: 59464 - RNA, 59 nt, Pseudomonas aeruginosa PA01
augccugggcagcacguagagcugggccagcaccagcggcagcucgcgguugccggcau

SEQ ID NO: 59465 - RNA, 59 nt, Pseudomonas aeruginosa PA01
augcgcgacgcggggauggacguggaggccuaucucuacgccaucugagugcucgccau

SEQ ID NO: 59466 - RNA, 63 nt, Pseudomonas aeruginosa PA01
auggcgcguuguccucgccgccguugcgcgaagguacgugauucguggcaggggaugcgccgu

SEQ ID NO: 59467 - RNA, 71 nt, Pseudomonas aeruginosa PA01
cccgaagaggcuauccgucgcgccgcuaccauccugcaacagcagcuggcagcguucguggaccucaaggg

SEQ ID NO: 59468 - RNA, 56 nt, Pseudomonas aeruginosa PA01
cccgacauucugcgccuaaguucgaaauccgcucaagcgcggcgccgaauaucggg

SEQ ID NO: 59469 - RNA, 78 nt, Pseudomonas aeruginosa PA01
cccccagcgcugcagucggcaacuggcucuggcgccagggcagcgccgauagggaaggagugccgacggccugguggg

SEQ ID NO: 59470 - RNA, 73 nt, Pseudomonas aeruginosa PA01
cccagggcgcggucgccgggguccagcuggcccacgccgggcgcaaggcgaguaccuggcggccguggcuggg

SEQ ID NO: 59471 - RNA, 58 nt, Pseudomonas aeruginosa PA01
cccaguccggcgcauacggcgcgcaccugcucggcauggcgcgccagcgccgccuggg

SEQ ID NO: 59472 - RNA, 57 nt, Pseudomonas aeruginosa PA01
cccagcucgacaucccggcgcuguggcaggccuucggucgcgccgggcugcccuggg

SEQ ID NO: 59473 - RNA, 107 nt, Pseudomonas aeruginosa PA01
ccaggccagcggccggcugugcaucggggugacgccuuggguggcgcugaccuuccucucggaggcggugcaggcguuccgcgagcgcaugccggaggugcgccugg

SEQ ID NO: 59474 - RNA, 55 nt, Pseudomonas aeruginosa PA01
ccaggccgccgacguagcgaucggagccgaucacgcugcgcaucuccgcggccgg

SEQ ID NO: 59475 - RNA, 56 nt, Pseudomonas aeruginosa PA01
ccaggccgcucagggucaacggauacaucuguuccuugaccaguucgcggaccagg

SEQ ID NO: 59476 - RNA, 65 nt, Pseudomonas aeruginosa PA01
ccaggcgaucggugccggaguugugcucggcacgcgucagcagcgccucggcgccgaaccccugg

SEQ ID NO: 59477 - RNA, 130 nt, Pseudomonas aeruginosa PA01
ccaggcgcugccgucggcggaccugaucguccugcccggcucgaagagcgugcgcgccgaccucgcggcgcugcgcgagcguggcugggacgaggcgauccuccgucaccugcgcuacggcggucgccug

SEQ ID NO: 59478 - RNA, 96 nt, Pseudomonas aeruginosa PA01
ccagcucgguguugaagcgagugucgccgccgacgcccuucuuggucacgauguugaugaucccgccgguggcgccgccgccguacaccgcgcugg

SEQ ID NO: 59479 - RNA, 78 nt, Pseudomonas aeruginosa PA01
ccaggcuggccaccggcucggcgacgccgagguacuggccgaggugcacgcggcggaugccgagcuggccggagaagg

SEQ ID NO: 59480 - RNA, 56 nt, Pseudomonas aeruginosa PA01
ccagggcacgcugggcgucggcaucgacgccuucgcccagcucggcgugcgccugg

SEQ ID NO: 59481 - RNA, 56 nt, Pseudomonas aeruginosa PA01
ccagggcaucgagacuuccggccacuaugacuucgccgcucucgauccgcgccugg

SEQ ID NO: 59482 - RNA, 99 nt, Pseudomonas aeruginosa PA01
ccaguugcaacaccguggcguucuauuuccacgagcgugucuggcagcgcuucggcgcccggccgcgccgggagagcggacacggccacggcaaucugg

SEQ ID NO: 59483 - RNA, 71 nt, Pseudomonas aeruginosa PA01
ccaggcuccgcgcggugccgagggcggcaucgaagguuucgcggcuauguucggcgaagcgcgggcgcugg

SEQ ID NO: 59484 - RNA, 80 nt, Pseudomonas aeruginosa PA01
ccaucuggucggccuggccgaggugcuggcgauguaccugcuggucuggucgccggcgcccuggcgccuggucaggcugg

SEQ ID NO: 59485 - RNA, 116 nt, Pseudomonas aeruginosa PA01
ccacgagcugcgcacgccgcuggcgcgccugcagguggcggcagagggcacgcuguccgcgcagcuccugcgcgagcgccuggagcaggagguacagggcaugcagcaacuggugg

SEQ ID NO: 59486 - RNA, 78 nt, Pseudomonas aeruginosa PA01
ccagcaccguggcgagcaggcggucggcgccguaccaggccucggcgccgaacaggucgcgcucggcgaguugccagg

SEQ ID NO: 59487 - RNA, 69 nt, Pseudomonas aeruginosa PA01
ccagcacuuucucggccuuacccuggcggaucaugcucgcugccaggcgcagguugagcaggaagcugg

SEQ ID NO: 59488 - RNA, 71 nt, Pseudomonas aeruginosa PA01
ccagcagcagcaagcugcacagcgccgcgccaagcaucugccggcgcccggcgaacagcuugcgcucgcgg

SEQ ID NO: 59489 - RNA, 75 nt, Pseudomonas aeruginosa PA01
ccagcacucggcccggcugcugcgggucggccuuguacagcaccaguucggccucggcaucgucccagguggugg

SEQ ID NO: 59490 - RNA, 95 nt, Pseudomonas aeruginosa PA01
ccagccguaguaguuguccgcuccgcucuuggcgccgcccaccgcauggucggccaguugcgcaccaagcuggcgggcgagcaccucgacggcgg

SEQ ID NO: 59491 - RNA, 65 nt, Pseudomonas aeruginosa PA01
ccagcgccgacgggcucgacaugagcuucucgccuauggucgacaucacccgcgacgcgcgcugg

SEQ ID NO: 59492 - RNA, 71 nt, Pseudomonas aeruginosa PA01
ccagcgccgccccggacaggcccggagcgugcucguugacgugcaggcuggcgucuuccagggccgacugg

SEQ ID NO: 59493 - RNA, 56 nt, Pseudomonas aeruginosa PA01
ccagccagccuucgccgaggcucggugcgcgcacccagagcugcgacggcuggugg

SEQ ID NO: 59494 - RNA, 63 nt, Pseudomonas aeruginosa PA01
ccagcaggaaccgcgcgcgguucuccaggcuaccgccauaggcaucgcugcgccgguugcugg

SEQ ID NO: 59495 - RNA, 87 nt, Pseudomonas aeruginosa PA01
ccacgucguagucgguuucgcccagcucggugccgauggccagcaccacgucggccucgguggccagcucgcguaccggcacgcagg

SEQ ID NO: 59496 - RNA, 103 nt, Pseudomonas aeruginosa PA01
ccacuacuaccaaccgggcuggacccuggucgguggcggcgccuacgcacagggcgacaccgcgcggccgauggccgggcuggucccgcccggcguggagugg

SEQ ID NO: 59497 - RNA, 99 nt, Pseudomonas aeruginosa PA01
ccaccugccggccuuccuccagcuccagcagcccggcgccgagcgccaccaggcacggcaggcccuugcugcgggcgaggauggccacgugggaggugg

SEQ ID NO: 59498 - RNA, 113 nt, Pseudomonas aeruginosa PA01
ccaccugguggacggccgcggcaccgaccugcugcccggggcgccggaccugcaggagcuggccaagguguuccugcgccugcgcccgcuggcggaacacgugguccaggugg

SEQ ID NO: 59499 - RNA, 56 nt, Pseudomonas aeruginosa PA01
ccacgagccggagcuggccuuccgcaucggcggcaaggucauccgccggcuggugg

SEQ ID NO: 59500 - RNA, 85 nt, Pseudomonas aeruginosa PA01
caugggccuggccguucccggcaccggucuggcggucauggcgagcguggcccgcgagcguuccgggauggccucggcgaccaug

SEQ ID NO: 59501 - RNA, 55 nt, Pseudomonas aeruginosa PA01
cagcaacugcuccgccgcgcgccggccgauggcuucgcgcggggugcggaugcug

SEQ ID NO: 59502 - RNA, 130 nt, Pseudomonas aeruginosa PA01
cagcaggccgccgaggcugaccuccaggccgccccggcugcucagcgugcccuugccgcuguuguccaggcugcgcgcccgcaggucgaggcgguuggcugcggagaacaagccgaggcgguugucgaug

SEQ ID NO: 59503 - RNA, 61 nt, Pseudomonas aeruginosa PA01
cagcaggcgaucgagcaugccgcccugcuccagcaggcggcgggcgacgaucacccgcaug

SEQ ID NO: 59504 - RNA, 91 nt, Pseudomonas aeruginosa PA01
cagccgcagcucgaggccacugcaaucggugcuggugcgcgcgguggcguucuuccucggcgccagcgccggcaugucgcugcugccgcug

SEQ ID NO: 59505 - RNA, 61 nt, Pseudomonas aeruginosa PA01
cagccagcccggcggucuccgcgaacccgcuccgacgcggccggcgcgccaggucuggcug

SEQ ID NO: 59506 - RNA, 65 nt, Pseudomonas aeruginosa PA01
cagcggagagacuuuuucauuaaaauucuugucgaaauaaugaauauucggaagucuccccccug

SEQ ID NO: 59507 - RNA, 70 nt, Pseudomonas aeruginosa PA01
cagcggcagcaacgccagucccuggccgcgcagggcggcgucgcgcauggccuggccguuguugcugcug

SEQ ID NO: 59508 - RNA, 130 nt, Pseudomonas aeruginosa PA01
cagcggcggccugucgcugauguucgcccgggucgcccugggcgcggcggaagcgccgcuguuccccuccggcggcaagcucaacucgcuguggcugggcuccagcgaacgcagccgcggcgccgugcug

SEQ ID NO: 59509 - RNA, 85 nt, Pseudomonas aeruginosa PA01
cagcguccagcauuccuggaccggccaggagcaaugggugguccaccaccugacccuggccggccacgaccugcucgaccgccug

SEQ ID NO: 59510 - RNA, 126 nt, Pseudomonas aeruginosa PA01
cagcgugcccacuacgucgagggccggcguaucgccgagcguccggugcugcucgagcugggugccgaacuggggcuuggcgagggcuucgccgaggcguucgacgccugcuccggcgagccgcug

SEQ ID NO: 59511 - RNA, 62 nt, Pseudomonas aeruginosa PA01
cagcucgccaccggcaagcccugggcacugaacacgauggcgcgggagcugguggugcccug

SEQ ID NO: 59512 - RNA, 72 nt, Pseudomonas aeruginosa PA01
cagcucggccggcagcucguaggcauuggcuucgacgaaacgcggcugaugcggcgagcgcucggccaguug

SEQ ID NO: 59513 - RNA, 58 nt, Pseudomonas aeruginosa PA01
cagcgccuugcgcgcgcgucugcuggguucgccgcgggagggcgccagcgaggugccg

SEQ ID NO: 59514 - RNA, 55 nt, Pseudomonas aeruginosa PA01
cagcgccaccccgaggaucgccggcucguccggcggacgcccgguguaggugcug

SEQ ID NO: 59515 - RNA, 60 nt, Pseudomonas aeruginosa PA01
cagccgcucgccgaccccgaccugugcaaacgccugcaggccgcccuggucgagcagcug

SEQ ID NO: 59516 - RNA, 84 nt, Pseudomonas aeruginosa PA01
cagccggggaacugcccggcggcacgcugggccugcagcgaaaacgccgcggccggacgcucgccgggcaggccgagcaggcug

SEQ ID NO: 59517 - RNA, 58 nt, Pseudomonas aeruginosa PA01
cagccugaaggacuggccggcggcggacugcgccaccaggcagcuguucuucaggcug

SEQ ID NO: 59518 - RNA, 78 nt, Pseudomonas aeruginosa PA01
cagcgacucgacguccgggaucaccccgucgcugccgaugugccccucggcggcggcguucuggaucggcgacagcgg

SEQ ID NO: 59519 - RNA, 58 nt, Pseudomonas aeruginosa PA01
cagcgagaaggaacaguuggcgaucuaccgcgagcagcucagugccuuccacccgcug

SEQ ID NO: 59520 - RNA, 79 nt, Pseudomonas aeruginosa PA01
cagcgagccgcacacgcccagcagcgaugcgcccagcagcaacuggcggugcgggcgggugcgggccaggcggccgcug

SEQ ID NO: 59521 - RNA, 97 nt, Pseudomonas aeruginosa PA01
caggucgcugcccucggucgcccguugcaucggcucgcguucgucgugguuaccggcgaaccagcgcaacggcgcguccaggggggcgcucaaccug

SEQ ID NO: 59522 - RNA, 60 nt, Pseudomonas aeruginosa PA01
caggucggcacgccgcuggcgcgcuccggcaacaccggcaacagcagcgggccgcaccug

SEQ ID NO: 59523 - RNA, 104 nt, Pseudomonas aeruginosa PA01
cagggacagggcgcgcggcgcgaaggacggccgcggguugacggaacgggagcuguucauaggcuuucuggcucuucuucguugaucggcgaguccuggcucug

SEQ ID NO: 59524 - RNA, 108 nt, Pseudomonas aeruginosa PA01
cagggccugggccagcucgcggcuggcgggcauccgcgugcggcugccgaggcggccgucgaggauccguucgcgcagcgcggcguagagcuggcgggccaggcccug

SEQ ID NO: 59525 - RNA, 67 nt, Pseudomonas aeruginosa PA01
caggccgaccaggaacgcggugaucgucugugguugcagguccaugugccgcgccugcucggcacug

SEQ ID NO: 59526 - RNA, 73 nt, Pseudomonas aeruginosa PA01
caggccgagccagccgcgccaggccaggcgcuggccgaacagcgcccagcccauggcgacgguggcgaggaug

SEQ ID NO: 59527 - RNA, 65 nt, Pseudomonas aeruginosa PA01
caggccggcgcgcuccugcagacccgccguuaccggcggcucaugcguucgcgcgccgaagccug

SEQ ID NO: 59528 - RNA, 68 nt, Pseudomonas aeruginosa PA01
caggccuguagcgccgaggcggccacuucgcgcaaggcggugucgucgggccgcucggccagcgccug

SEQ ID NO: 59529 - RNA, 60 nt, Pseudomonas aeruginosa PA01
caggcgcuggcgcaacgcaccgaaggccucgauccgcgccuggugccggcgcugcaccug

SEQ ID NO: 59530 - RNA, 74 nt, Pseudomonas aeruginosa PA01
caggcggaggccgguguaccggugaaggaacugugucgccgacacggcuucagugaugccucguucuacaccug

SEQ ID NO: 59531 - RNA, 81 nt, Pseudomonas aeruginosa PA01
caggccagccgcauccugcgccuggugguggcgcacggcgacccguggcagaaggccgaggcgcgcgaguugcuggcacug

SEQ ID NO: 59532 - RNA, 105 nt, Pseudomonas aeruginosa PA01
cagcuuucgucgugguuauagccgcugguggugcagcccaggcaacggacgaaggcuuccuugcccggaucgaccaccagcgccuggccggccuugccgacgcug

SEQ ID NO: 59533 - RNA, 59 nt, Pseudomonas aeruginosa PA01
cagcuggagcagaugaaagccuaugcggacgacgucgaaggccauguccugcccggcug

SEQ ID NO: 59534 - RNA, 70 nt, Pseudomonas aeruginosa PA01
caguccgaucggccugcgccacgauccgcgcgagacccagcggaugcgccgcgaagggcugaucgcgcug

SEQ ID NO: 59535 - RNA, 129 nt, Pseudomonas aeruginosa PA01
caggucuucggcgcuggcgccgagcccgaccaggcgugcggccuggcugaacgacagcguggucggaucgcgcugcuccaggcgcgcgacccggucgggaagcggcgcgaguugcuugccgagguccug

SEQ ID NO: 59536 - RNA, 112 nt, Pseudomonas aeruginosa PA01
cagguguacgccgacgcgcugggcgccccauacggagaucgccgcgucggugaccuccagcagcaggcgcgcgcgguucucgauggagccgccguagcggucggugcgcuug

SEQ ID NO: 59537 - RNA, 64 nt, Pseudomonas aeruginosa PA01
cauaagcccuggagaucccguuggugcuugaaagguguaacgggcgaggguaccgggagcuaug

SEQ ID NO: 59538 - RNA, 66 nt, Pseudomonas aeruginosa PA01
caguugcccggccauguccuccagcgaccagagcaccuguugcggaucgucguagccgagcaucug

SEQ ID NO: 59539 - RNA, 116 nt, Pseudomonas aeruginosa PA01
caucggagcgcacacaggcaaggcgggccccgcuggacggggccucguugaagguucagaagcugaagucgaccuugguccagaagguccggcccggcucuggaaccguuucguug

SEQ ID NO: 59540 - RNA, 85 nt, Pseudomonas aeruginosa PA01
caucguuccgcagcucuggcacgucggcagcguccggcgccugggcguggagccggacgccagcgugcccggcuacggcccgaug

SEQ ID NO: 59541 - RNA, 64 nt, Pseudomonas aeruginosa PA01
caucgcccggcgcacccaccggcugaccgcgauccucgccgccggccuggagcgccugggcgug

SEQ ID NO: 59542 - RNA, 130 nt, Pseudomonas aeruginosa PA01
caugaccggcuggcgccugggcuggcugguggcgccgacagcggcggugccugaacuggagaagcuggcgcagaaccucuacaucagcgcgccgagcauggcccagcaggccgcgcuggccuguuucgag

SEQ ID NO: 59543 - RNA, 109 nt, Pseudomonas aeruginosa PA01
caucaccucgagguuggcgaacaugcccggcagcagcuugccguccggguucuccagggcagcgcggaccugcagguugcgggucucguugucgaccuugggguugaug

SEQ ID NO: 59544 - RNA, 88 nt, Staphylococcus aureus subsp. aureus Mu50
caucaaugucauggacagaaauaugauguaauuguuguucgauuguugaaaaauaaucuauauuaucuuucgucaauugaauuugaug

SEQ ID NO: 59545 - RNA, 61 nt, Staphylococcus aureus subsp. aureus Mu50
cauaucauuaauugcacuaccaaugauuauuguuaauagcguugguacggcgauuuuuaug

SEQ ID NO: 59546 - RNA, 93 nt, Staphylococcus aureus subsp. aureus Mu50
caguguuaauaguuaauuucacauuuggauauuuacgaacgauuucagcguucagauccagucgauguggauuggcauuaauuucuaauacug

SEQ ID NO: 59547 - RNA, 58 nt, Staphylococcus aureus subsp. aureus Mu50
cauauagcguucucgcauaaguagguuuauuaaucugcaaauguugagcgcauauuug

SEQ ID NO: 59548 - RNA, 75 nt, Staphylococcus aureus subsp. aureus Mu50
ccagauaaaauuauggauacacugauuaauuaucauucccuagauauucaaugggguaaucaugaugugcuuugg

SEQ ID NO: 59549 - RNA, 79 nt, Staphylococcus aureus subsp. aureus Mu50
ccaucacgauuugggaggaaauuuuauuggaccuucaagagcgcgguuugaaaaauguccuccuguucaucacggaugg

SEQ ID NO: 59550 - RNA, 56 nt, Staphylococcus aureus subsp. aureus Mu50
auguaucucuauauuuacugaaguuucaauucggucuaauuuuauagaaggugcau

SEQ ID NO: 59551 - RNA, 55 nt, Staphylococcus aureus subsp. aureus Mu50
auguucaucuacaguauuauguguauaaggcaaaguuggauuuguagaugaaggu

SEQ ID NO: 59552 - RNA, 113 nt, Staphylococcus aureus subsp. aureus Mu50
augugucaauaauacguucgacuugggcaucgcuuaaaugguuuugauuuuuuccuuuuucaaaaucauuggaugcaucgauaaauaauacguugucgucuuguuggcaacau

SEQ ID NO: 59553 - RNA, 107 nt, Staphylococcus aureus subsp. aureus Mu50
auuagguuuauaauauuaaaagcaugauacucaauaaaauuggaacacgaaauggugaacuaaauugaaugagugucaugcuuaauuuauguguugugauauauagu

SEQ ID NO: 59554 - RNA, 69 nt, Staphylococcus aureus subsp. aureus Mu50
auucagaccgaaaagaaagcauaugcaacuucaagagugaaggggcauaugcuucuuuuucaauugagu

SEQ ID NO: 59555 - RNA, 106 nt, Staphylococcus aureus subsp. aureus Mu50
aucuucugguucuuuaccuaaugauuuugguacgauacugaauguauuugaaauaccaucuuuacagcaaucguaagggaucuuagcuacagaacuuaaugaagau

SEQ ID NO: 59556 - RNA, 75 nt, Staphylococcus aureus subsp. aureus Mu50
augccguauguuauaugagacggggucauuucuugaauuaagagaagaaacaauugucuuauugaaaacuggcau

SEQ ID NO: 59557 - RNA, 68 nt, Staphylococcus aureus subsp. aureus Mu50
augauaauacaagauagacaacuuucuauacucuaauauagugaguugaaguagcuugucauaaucau

SEQ ID NO: 59558 - RNA, 73 nt, Staphylococcus aureus subsp. aureus Mu50
aucgauuagcaacaauuguaaaguuugaaaugucucaaaaggcauauucaacugacguuguuuguuaaucgau

SEQ ID NO: 59559 - RNA, 60 nt, Staphylococcus aureus subsp. aureus Mu50
aucauucaaaccuaaguaagcuuccguuuccacgauguagccuguauacguuugaguggu

SEQ ID NO: 59560 - RNA, 88 nt, Staphylococcus aureus subsp. aureus Mu50
auauaagaaauccaccuacgauucgaaauagguaucuuaaagcauaucucaagauauccauuaugauguagauggacaguuuuuauau

SEQ ID NO: 59561 - RNA, 89 nt, Staphylococcus aureus subsp. aureus Mu50
cacauaaaaauuuaucaucaacaauuggugaaccuaaugccaaugcauaugcuucgggcugguuuaccaauaaugaugaacauuuagug

SEQ ID NO: 59562 - RNA, 87 nt, Staphylococcus aureus subsp. aureus Mu50
cacauaaaguaucaccaguaccuguaucuuuaagaccuaccgcagccgcgauaucuccagaguauacaguaucgauuucuugacgug

SEQ ID NO: 59563 - RNA, 68 nt, Staphylococcus aureus subsp. aureus Mu50
caauugacauuacgacagcacuuguuguaucaaauguaacgacacgaucugcuguuguaggucccuug

SEQ ID NO: 59564 - RNA, 66 nt, Staphylococcus aureus subsp. aureus Mu50
auuugaaaggagccgauaaugguguuaucaauuagaagucaaaucauuauuggcgucguuucgagu

SEQ ID NO: 59565 - RNA, 67 nt, Staphylococcus aureus subsp. aureus Mu50
auuugucuuugcacuguucacuggaguacugcaaaguauuucaucagauugguacgaagcagcagau

SEQ ID NO: 59566 - RNA, 55 nt, Staphylococcus aureus subsp. aureus Mu50
auuuugaugagcgugcaauacuuaauaguaauugagcguaugccgcuuucgaaau

SEQ ID NO: 59567 - RNA, 56 nt, Staphylococcus aureus subsp. aureus Mu50
caaaguaauguaugaaguugugguaacacauaaacgugauucauaucauuacuuug

SEQ ID NO: 59568 - RNA, 69 nt, Staphylococcus aureus subsp. aureus Mu50
aggaaaucaugacuuaugugugagugaacgaucaucuauacauccguucacuucaucucaugacuuucu

SEQ ID NO: 59569 - RNA, 76 nt, Staphylococcus aureus subsp. aureus Mu50
aggaggacaacauagugaguuuguuacauauugcggugauauuaccguuaauauucgcacucauuauuccuauccu

SEQ ID NO: 59570 - RNA, 118 nt, Staphylococcus aureus subsp. aureus Mu50
aggaauuagaaaguuuagcagguguaggacguaaaacugcuaauguagucaugaguguagcauuugaugaaccuucauuagcuguugauacgcauguagaacguguuucuaaacgcuu

SEQ ID NO: 59571 - RNA, 57 nt, Staphylococcus aureus subsp. aureus Mu50
acuuaaaaaagcagugaaucauuucaauagauggaaugauuuuacugcuuuuugugu

SEQ ID NO: 59572 - RNA, 130 nt, Staphylococcus aureus subsp. aureus Mu50
agauguuguagacuuauacauucaauacccagauauuguagauaaauuagcguuguuaaaaggucaagaauaugaaauugcaacaauuaaugaucuuacagaagcuuuugaagcagaccugucuacaucu

SEQ ID NO: 59573 - RNA, 79 nt, Staphylococcus aureus subsp. aureus Mu50
agugaaccauaacuuaaaagucacaauacacaugacuaaaaaugucugugcuauuguggcuuuuuuaaauugguugauu

SEQ ID NO: 59574 - RNA, 65 nt, Staphylococcus aureus subsp. aureus Mu50
acaucuaacaguaaacauuuaggcaguauaguuuaaaaucacugcgcaaugauacugucagacgu

SEQ ID NO: 59575 - RNA, 59 nt, Staphylococcus aureus subsp. aureus Mu50
accagcuaaauuacuaccuucagucaacgucccuguuacugauacaguguuugacuggu

SEQ ID NO: 59576 - RNA, 59 nt, Staphylococcus aureus subsp. aureus Mu50
accagcuacaguaguugcauuuuguacuuguuguuuuaaugcaucuuucugugcuuggu

SEQ ID NO: 59577 - RNA, 98 nt, Staphylococcus aureus subsp. aureus Mu50
aauguagauguucuuuagacauuaaaagcuucuaacaugauacggaauaugagguuccuguaucacauuagaagcuuuuuuguugcggugcuuauauu

SEQ ID NO: 59578 - RNA, 78 nt, Staphylococcus aureus subsp. aureus Mu50
aauauuguauaaauagagaagagcaguaagacgguaucuaauugaaaaugaucuuacugcucuuuuauauacuuuauu

SEQ ID NO: 59579 - RNA, 60 nt, Staphylococcus aureus subsp. aureus Mu50
aaucaaauuauauugagccguuugaaucaaaauuggaugugucgguaaauugauuugauu

SEQ ID NO: 59580 - RNA, 107 nt, Staphylococcus aureus subsp. aureus Mu50
aaucaccggugcaaaguauuauuuguuauuuagcuuugcaucguuuacauaaagugccuaugaugauggaagguaaauggcaaaguacuauacaucgucaauugauu

SEQ ID NO: 59581 - RNA, 59 nt, Staphylococcus aureus subsp. aureus Mu50
aaucacuagagcuaugaaacuuggugcuaaagguaucaaaacucaaguaucuggucguu

SEQ ID NO: 59582 - RNA, 72 nt, Staphylococcus aureus subsp. aureus Mu50
aaugcaaguuggggugggacgacgaaauaaauuuugcgaaaauaucauuucugucccacucccauuggcauu

SEQ ID NO: 59583 - RNA, 67 nt, Staphylococcus aureus subsp. aureus Mu50
aauugcaucauuuaaagcugcuucagaaguagaagguauaaacugguuggaguuagauguugcaauu

SEQ ID NO: 59584 - RNA, 61 nt, Staphylococcus aureus subsp. aureus Mu50
aauucuacaucaauccuacaggacgcuuuguaaucgguggaccucaaggugaugcaggauu

SEQ ID NO: 59585 - RNA, 101 nt, Staphylococcus aureus subsp. aureus Mu50
aauuggcauggcguuaaauauuacugguuccaguuuuuuguggccuuuaaauacaauuuauaugaaacaagaacuuggaaaaaguuuaacuguugcugguu

SEQ ID NO: 59586 - RNA, 87 nt, Staphylococcus aureus subsp. aureus Mu50
acguguuuccauuguugauacaaacauuuucaauaauugauucgcuucauauugugaaguuugaaacuguucaacuaugggcaaugu

SEQ ID NO: 59587 - RNA, 68 nt, Staphylococcus aureus subsp. aureus Mu50
aacacguugcagcacgugauucuggugcagcuauuacagcuaagcacagaggucguguugaacauguu

SEQ ID NO: 59588 - RNA, 70 nt, Staphylococcus aureus subsp. aureus Mu50
aacaacuucaugguuaaauugcacuguagcauuuggaugugcuucaaugcuuuuagccauuuuacguguu

SEQ ID NO: 59589 - RNA, 82 nt, Staphylococcus aureus subsp. aureus Mu50
aacauucccuuaauaauaaguauggucgugagccccucccaagcucgcggccuuuuuuauuguaauaaagaaggggagaguu

SEQ ID NO: 59590 - RNA, 79 nt, Staphylococcus aureus subsp. aureus Mu50
aaauggauacaguuuagugcgcaaauuaauuaaugaaucaggcauugauuuggcaucaaacuucgauaaucguccauuu

SEQ ID NO: 59591 - RNA, 55 nt, Staphylococcus aureus subsp. aureus Mu50
aaagcucucuucauaaucauguuguaguuuuuguugacaugaugaagagaguuuu

SEQ ID NO: 59592 - RNA, 59 nt, Staphylococcus aureus subsp. aureus Mu50
aaagacuuggucgaaucguggaugauauauuaucaaacgcacggcucgaacaagucuuu

SEQ ID NO: 59593 - RNA, 66 nt, Staphylococcus aureus subsp. aureus Mu50
aaaagaugguaacuauuauauggaagguaucuuagaugauauacaaccagaugguuaugguuuuuu

SEQ ID NO: 59594 - RNA, 67 nt, Staphylococcus aureus subsp. aureus Mu50
aaaacagcuuaaugauguaaugaaauuagugaguuaaucacugacuucaacgucauugagcuguuuu

SEQ ID NO: 59595 - RNA, 55 nt, Staphylococcus aureus subsp. aureus Mu50
aauacggcacuucuucaaaauuuuauagcgguuuugauaaggggaguguaguauu

SEQ ID NO: 59596 - RNA, 62 nt, Staphylococcus aureus subsp. aureus Mu50
aauacacuaaucgcacguacucacccuuuauuacagugauacggucauacgauuaguguguu

SEQ ID NO: 59597 - RNA, 81 nt, Staphylococcus aureus subsp. aureus Mu50
aauaauuugauugauuaugacuucggaauugauuuugcagaaagagcaaucaaaaaugaagacauaguuaauaaaaauguu

SEQ ID NO: 59598 - RNA, 129 nt, Staphylococcus aureus subsp. aureus Mu50
aagcuucagcaguuaauucaguuguaauugguuuuccuaauaauugugaauaugcaaguaaacguguuaaugcaccuucuaauucacgaauauuagauugaauuugauuugcuauauaauuuaaagcuu

SEQ ID NO: 59599 - RNA, 67 nt, Staphylococcus aureus subsp. aureus Mu50
gaagaagacuuauuuacugcguuugcugaagauaaugcacaagcaaaugcguuuacaagcuuugauc

SEQ ID NO: 59600 - RNA, 57 nt, Staphylococcus aureus subsp. aureus Mu50
gaaaugccccuuucgaaguagacauugaaaaaaugaaaacuuugaagggagcauuuc

SEQ ID NO: 59601 - RNA, 87 nt, Staphylococcus aureus subsp. aureus Mu50
gaaauaaugcagagguucaacuaggugcugauaaagcugcuaucuuugaugcacauuuauuaguuuuagaugacccugaauuaauuc

SEQ ID NO: 59602 - RNA, 56 nt, Staphylococcus aureus subsp. aureus Mu50
gaaaagcuccaaucaaaguugacgcucaaauaguuuaacuuugaucggagcuuuuu

SEQ ID NO: 59603 - RNA, 101 nt, Staphylococcus aureus subsp. aureus Mu50
gaaagcucccaagaguuaauuaaugaagcuguaaacuuauuggugaaaaguaaguaauggauauuguuaauauaguuaucauguuacucauugggguauuc

SEQ ID NO: 59604 - RNA, 67 nt, Staphylococcus aureus subsp. aureus Mu50
gaagaguuugaaugauaacucauugcauuuaaagauaaauggcaugcguuaugauuuaaagcucuuc

SEQ ID NO: 59605 - RNA, 59 nt, Staphylococcus aureus subsp. aureus Mu50
gaaggugguaauaacguuauuaaauuaaguacaggugaugacguuguugaauuaucuuc

SEQ ID NO: 59606 - RNA, 106 nt, Staphylococcus aureus subsp. aureus Mu50
cuucgaccugcagggauuauuuuuugugaaaaugaacguauugaugcuguuucagauggcaacuuuauuuuacgcaauaaaacggugaaaauccuugaaguugaag

SEQ ID NO: 59607 - RNA, 67 nt, Staphylococcus aureus subsp. aureus Mu50
gaauuagcuuuuucacauaucauaggucugaugcagacauugaaauuguugaagaagacuuugauuu

SEQ ID NO: 59608 - RNA, 102 nt, Staphylococcus aureus subsp. aureus Mu50
gacagucagguuuaaguuuaaaagcuuuaauuacuuuagccauugcuaccuucguugaaggugccugaucuguaauuaccuuuugagguuuaccaaauuguu

SEQ ID NO: 59609 - RNA, 60 nt, Staphylococcus aureus subsp. aureus Mu50
gagauuuucgaagcacguaacccuaaaggucaagcgguaauuacggaaaucgaagguguc

SEQ ID NO: 59610 - RNA, 66 nt, Staphylococcus aureus subsp. aureus Mu50
cugcaaauguuacaccuguuucuucgccaggacgguugacugagaaacuugguguacguuuuaaag

SEQ ID NO: 59611 - RNA, 55 nt, Staphylococcus aureus subsp. aureus Mu50
cuguuguuggauuaauguaugcauuugcgucacguuucagcguuccauucagcag

SEQ ID NO: 59612 - RNA, 89 nt, Staphylococcus aureus subsp. aureus Mu50
cuuaccauauagacauuuuguugugguuggauuucuaaaguuuuaaggucaccuuuuuccaacuucucaguaaauugauuauauguaag

SEQ ID NO: 59613 - RNA, 80 nt, Staphylococcus aureus subsp. aureus Mu50
cuauaguuacaugagacaccaugguuaugcugaccguuuaguacucgauaaaaauaaacauguuguuucugaaacuacag

SEQ ID NO: 59614 - RNA, 57 nt, Staphylococcus aureus subsp. aureus Mu50
cuauaaauacaagugcauauggaauuaagcuaucaccguuugaacuuguauuuguag

SEQ ID NO: 59615 - RNA, 83 nt, Staphylococcus aureus subsp. aureus Mu50
cuaggaauuauuauuuaccacuuaaacaagcaaugguugacagguggcuuuuuagguguggauacauuuuuugugaucucugg

SEQ ID NO: 59616 - RNA, 76 nt, Staphylococcus aureus subsp. aureus Mu50
cuaacuauaugagugauuuaaaugacgcuauguuacuuauuaaagguaauuuaaauuuagauccuguagaaguuag

SEQ ID NO: 59617 - RNA, 104 nt, Staphylococcus aureus subsp. aureus Mu50
cguauagccauaguccgagcguuagaagcgucacaggcaauggguacggcuacaugagaaccaugcagaagugaaauuccugugagcuuugcuagagcuguucg

SEQ ID NO: 59618 - RNA, 72 nt, Staphylococcus aureus subsp. aureus Mu50
cgacgcaaguaccuauuguaaaugggccugcucaucaucagcaauuccaaaagccagaagguacgguguacg

SEQ ID NO: 59619 - RNA, 78 nt, Staphylococcus aureus subsp. aureus Mu50
cgaaaucuuuagacaaguauccuacugaaaaucuagaagaguuuuaugauaaagaaggauauagagauggagaauuug

SEQ ID NO: 59620 - RNA, 62 nt, Staphylococcus aureus subsp. aureus Mu50
ccgguucguaucuugauacucaucgaccaauauuucuugaaaguguugacgguaugauucgg

SEQ ID NO: 59621 - RNA, 65 nt, Staphylococcus aureus subsp. aureus Mu50
ccuaaggauaguaaauaugucguaacuuguacgcaugaaaguuauaacgaaguuauuaugcuagg

SEQ ID NO: 59622 - RNA, 65 nt, Staphylococcus aureus subsp. aureus Mu50
ccuacuucaucaagcaauuguuucguaccacuaaaugaagcgauuuuacuugaagauacaguugg

SEQ ID NO: 59623 - RNA, 80 nt, Staphylococcus aureus subsp. aureus Mu50
cgcuuauugagccaaauagcaauccaacaauuucuugauugaacccaucagcuaaugaaaugaagauugcacucaaggcg

SEQ ID NO: 59624 - RNA, 65 nt, Staphylococcus aureus subsp. aureus Mu50
gcacuauuuguuaauaaauccauuucagguucaacuguuugcccuaauggauucgguaacaaugc

SEQ ID NO: 59625 - RNA, 68 nt, Staphylococcus aureus subsp. aureus Mu50
gauugucguagcaggcuaugucauuacauuaaauugggguacauuuauuugggcuguaacgaacgguc

SEQ ID NO: 59626 - RNA, 60 nt, Staphylococcus aureus subsp. aureus Mu50
gauuaccgcugaaaauggaauuaaguccuuaaauacuugugaaauauucggcgguacuuc

SEQ ID NO: 59627 - RNA, 80 nt, Staphylococcus aureus subsp. aureus Mu50
gcaacuuuagguaaugucauguuugcuucuauuuauuuagcaacagauauuuuaaaugauauuuaugggcguagaguugc

SEQ ID NO: 59628 - RNA, 72 nt, Staphylococcus aureus subsp. aureus Mu50
gcaauucggaaaaaaucgauuggcguggcuucagugcuuguagguacguuaaucgguuuuggacuacucagc

SEQ ID NO: 59629 - RNA, 103 nt, Staphylococcus aureus subsp. aureus Mu50
gagccucuuuaccuugaaaaguaugaacaguaccaauggauuuaucgacccauugauuaauuuuuguacguucaauaucaauucuagucgguaguuguugcuu

SEQ ID NO: 59630 - RNA, 63 nt, Staphylococcus aureus subsp. aureus Mu50
gaucguuuaauugcugugcuugguggaguuacuccauuuuuaauugcaauugucauuaugauu

SEQ ID NO: 59631 - RNA, 83 nt, Staphylococcus aureus subsp. aureus Mu50
gaugaaguguuuguuggccguauacguagagaugauucauuagaaaauacuuuccauguaugguguacaucagacaauuuauu

SEQ ID NO: 59632 - RNA, 65 nt, Staphylococcus aureus subsp. aureus Mu50
gaugacauauuuuaauagugaauauauuuugagauauuaauauauuuaauguuaaggauguuguc

SEQ ID NO: 59633 - RNA, 66 nt, Staphylococcus aureus subsp. aureus Mu50
gccaaugggagugggacagaaaugauauuuucgcaaaauuuauuucgucgucccaccccaacuugc

SEQ ID NO: 59634 - RNA, 78 nt, Staphylococcus aureus subsp. aureus Mu50
gccgaaucaugucgcugugcaauuugacggaguguuuauaacauaucaaacauugaaugcacgcgcgaaugauuuagc

SEQ ID NO: 59635 - RNA, 64 nt, Staphylococcus aureus subsp. aureus Mu50
gcuuuauugaugaugucuuuaugcuccgcuucuauuucugccaaccaagcaucaucgauaaugc

SEQ ID NO: 59636 - RNA, 77 nt, Staphylococcus aureus subsp. aureus Mu50
gcuuggugucuucuuagcgguuuaugugaugauuuuaaucuauuuugaaauacuaacauugacuucucaccguuggc

SEQ ID NO: 59637 - RNA, 70 nt, Staphylococcus aureus subsp. aureus Mu50
gcuuccgguaauuaucaagugccauuuucgauuggguuauacaaucuagaaucgcaugauaauuuaaugc

SEQ ID NO: 59638 - RNA, 58 nt, Staphylococcus aureus subsp. aureus Mu50
ggagauauugguaaagcuuuugcaagaagguugcaaggguuuaauacuaauauucuuu

SEQ ID NO: 59639 - RNA, 65 nt, Staphylococcus aureus subsp. aureus Mu50
ggacguaagagauaaaauaaagagguacuagaauuaacuagugccucuuuuauuauuuaacgucu

SEQ ID NO: 59640 - RNA, 59 nt, Staphylococcus aureus subsp. aureus Mu50
ggacguauuuuuuaucacauugaaaacuugcagguguucgguggguaaaugauacgucu

SEQ ID NO: 59641 - RNA, 129 nt, Staphylococcus aureus subsp. aureus Mu50
gcuaaaaaauaaaaaagacauaaucaugauuguucuugaugagcacuccauaaagucagguuaaaaguccaacuuuugagaugcacauuaucauuucaugauuaugucuacuuuuuaauauuuuuaugc

SEQ ID NO: 59642 - RNA, 78 nt, Staphylococcus aureus subsp. aureus Mu50
gcuaaaucauucgcgcgugcauucaauguuugauauguuauaaacacuccgucaaauugcacagcgacaugauucggc

SEQ ID NO: 59643 - RNA, 72 nt, Staphylococcus aureus subsp. aureus Mu50
gcugguacagguuguuauguaucgauuucagaagauaaacgauauuuauuugaagcgguauauggugcuggc

SEQ ID NO: 59644 - RNA, 98 nt, Staphylococcus aureus subsp. aureus Mu50
gcugggacauuaaguucuuaggcaauguaaaaaagcugauuucuauuaauuauuugauggaaauuagcuuuuuugauauguauuuuauaauguacagc

SEQ ID NO: 59645 - RNA, 81 nt, Staphylococcus aureus subsp. aureus Mu50
gcgauuacuaaaugcuacaaacgcuugugcauuauuaucaagauuuaaugaugcuaagaauuuuaguaaguaaagacccgc

SEQ ID NO: 59646 - RNA, 92 nt, Staphylococcus aureus subsp. aureus Mu50
gcgacaucugugugacgauaaugauaagcgacaguuaauaauuugugauuuuuauuagccgcuucaaucaugcgaucacacucuuccgucgu

SEQ ID NO: 59647 - RNA, 81 nt, Staphylococcus aureus subsp. aureus Mu50
uaccaauuucagcacgacgauuaaauacaugauauguacauugaccccauguauauaaguuuuggugacugaauacuggug

SEQ ID NO: 59648 - RNA, 73 nt, Staphylococcus aureus subsp. aureus Mu50
uaaauugggauuaaaugauucuuuauugguacagugguggcauuggaugaaucauuuauuacauuuuaauuua

SEQ ID NO: 59649 - RNA, 83 nt, Staphylococcus aureus subsp. aureus Mu50
uaacaaaaugaugauaaacuaguauacauugugguaaaaguaguaaugaccaguuguuacuaguaauuaucagcauuugguua

SEQ ID NO: 59650 - RNA, 63 nt, Staphylococcus aureus subsp. aureus Mu50
uaaauagaaacagcaguaagaugauuucaaaugugaaagucauccuacugcuguuuuuauuug

SEQ ID NO: 59651 - RNA, 62 nt, Staphylococcus aureus subsp. aureus Mu50
guugauguugcuaacuucuuaacaaguaugggagcuaauauuaagggagcgggcacaucaac

SEQ ID NO: 59652 - RNA, 58 nt, Staphylococcus aureus subsp. aureus Mu50
guuggggugggacaacgaaauaaauuuugcgaaaauaucauuucugucccacucccac

SEQ ID NO: 59653 - RNA, 62 nt, Staphylococcus aureus subsp. aureus Mu50
ucaagguguaguuagugauuaucauauacauaaaaauaagauauuugcuaaaaauacuuuga

SEQ ID NO: 59654 - RNA, 59 nt, Staphylococcus aureus subsp. aureus Mu50
ucaaauuacgugcuaaagcuugagauaucaauauuuauuggcgauagaguguaauuuga

SEQ ID NO: 59655 - RNA, 69 nt, Staphylococcus aureus subsp. aureus Mu50
ucacgcacgugaugugauugaauuuaaacauuuagaaauagauaaugaugcacaucgcguacuugcuga

SEQ ID NO: 59656 - RNA, 60 nt, Staphylococcus aureus subsp. aureus Mu50
uaucugccguuugauuucagaagaacgucuauaucguuuuauugaucgacacgguaagug

SEQ ID NO: 59657 - RNA, 70 nt, Staphylococcus aureus subsp. aureus Mu50
uaugcugugaaguuauuaaaucauuugagacauaaugguauuaaagcagauaaagacuacuuacagcgua

SEQ ID NO: 59658 - RNA, 68 nt, Staphylococcus aureus subsp. aureus Mu50
uauuaugaacgaaacagacuuacaaggccuauuauuuugguuaaguggcuccguuucauuacguaaua

SEQ ID NO: 59659 - RNA, 87 nt, Staphylococcus aureus subsp. aureus Mu50
ucaaaaauguugauaaaucaaggugugacguggguucacacauuuguuaaaauuauguguacauuuugugacuaauagcguuuuuga

SEQ ID NO: 59660 - RNA, 62 nt, Staphylococcus aureus subsp. aureus Mu50
uagauuuuauauaaaaagaagaucccucaaucgaggggucuuuuuuuaauguguaaauuuug

SEQ ID NO: 59661 - RNA, 59 nt, Staphylococcus aureus subsp. aureus Mu50
uacuuauuuuaacaucuagcgguacaagcgucuuggaggcuaguauguugaacauugua

SEQ ID NO: 59662 - RNA, 94 nt, Staphylococcus aureus subsp. aureus Mu50
uagaggugcuuugauuuuauugaagcaucaaauuaucccuuuuuucucagugggagacuuugauucagucaguaaagaagaacgccaacuucua

SEQ ID NO: 59663 - RNA, 92 nt, Staphylococcus aureus subsp. aureus Mu50
uagcuacauuuggaugcucauaauagauucuauuuuuaaauuggucuguuacuucuuuaagguuagagucauuuggaucugcauaguagcua

SEQ ID NO: 59664 - RNA, 64 nt, Staphylococcus aureus subsp. aureus Mu50
uagcuaugaccauaugccauguuagcauaugcgcuaugauccacauugggcauaaucacagcua

SEQ ID NO: 59665 - RNA, 67 nt, Staphylococcus aureus subsp. aureus Mu50
uauaaauagagaacagcaguaagacgauuucaaugagaagcugucuuacugcuguuuuuagguuaua

SEQ ID NO: 59666 - RNA, 65 nt, Staphylococcus aureus subsp. aureus Mu50
uaguagcuggcaaggaaaugaaauugucuuacauaaagacauuaauauuucaauugcuguugcug

SEQ ID NO: 59667 - RNA, 105 nt, Staphylococcus aureus subsp. aureus Mu50
uaucuacuauaacaaguacgcuaauuaacuuuguuaauagaguuauucaaggauucguuaauguuguaaacaaaguuagucaagguaugacaaaugcaguaaaua

SEQ ID NO: 59668 - RNA, 59 nt, Staphylococcus aureus subsp. aureus Mu50
ucaucaacguuuuauggcacagcuugauuuuggcggugugccauuugaaaauguuauga

SEQ ID NO: 59669 - RNA, 68 nt, Staphylococcus aureus subsp. aureus Mu50
ucauuaaugucuacguaugaaucuagcuaggacauucccuagcguuugaaucacuuggacaauaauga

SEQ ID NO: 59670 - RNA, 61 nt, Staphylococcus aureus subsp. aureus Mu50
ucgcugcaucguauaguuguugugcaaguucucuuguuggugcaacuacgauugcuugugg

SEQ ID NO: 59671 - RNA, 72 nt, Staphylococcus aureus subsp. aureus Mu50
ucguagaaaaugagagcccccuuuaccacaacauguaaaugcauauugugaaaagggggcuuuuauuuauga

SEQ ID NO: 59672 - RNA, 67 nt, Staphylococcus aureus subsp. aureus Mu50
ucggcauuuuaauuguaauauugcgcuucacacagaaguuauaaacaauaacaguuacaaaugcuga

SEQ ID NO: 59673 - RNA, 68 nt, Staphylococcus aureus subsp. aureus Mu50
ugaacgccaaaugcugucgucuacuuuuaaauuuucaauacuuagagguaucucauauuuggccauca

SEQ ID NO: 59674 - RNA, 55 nt, Staphylococcus aureus subsp. aureus Mu50
ugaacaaccgggcagaaugaaaaucaaaacgauuuuuacucuguccgguuuuuua

SEQ ID NO: 59675 - RNA, 85 nt, Staphylococcus aureus subsp. aureus Mu50
ugcaccuaacgccaaaauuguacauguagauauugauccuucagaaaucaauaaaguuauucauguagauuuagguauuauugca

SEQ ID NO: 59676 - RNA, 58 nt, Staphylococcus aureus subsp. aureus Mu50
ugcaaaagcauugaauaaaacugucauagcugaugacaguggacuagaaguuuuugca

SEQ ID NO: 59677 - RNA, 66 nt, Staphylococcus aureus subsp. aureus Mu50
ugauugguggguuuuucuucaaguaguccaucauauauuuucuagcuaaaaggaaaccuccaauua

SEQ ID NO: 59678 - RNA, 63 nt, Staphylococcus aureus subsp. aureus Mu50
ugccaaugauugaccgcuuccauaugcacaacaacaauuugcgcaaguggcaauguauuagca

SEQ ID NO: 59679 - RNA, 66 nt, Staphylococcus aureus subsp. aureus Mu50
ugccauagcguuugaguugcgaaaacauguucaacuucacuuguuccaauuccaaaugcaauagca

SEQ ID NO: 59680 - RNA, 89 nt, Staphylococcus aureus subsp. aureus Mu50
uguuuaaugcauucaauuggucgaugucauguuuaccauuuguuuuagcaagugcuacacguucaucaccauuuaaugcuuguuuugca

SEQ ID NO: 59681 - RNA, 113 nt, Staphylococcus aureus subsp. aureus Mu50
uguuauuguuuuggcgugucucccgauaagcguuguaugaggcaaugauuguuguaauucauaggcaauaguuguaccgacagcgccugggccgauaaucgcaacugauaaca

SEQ ID NO: 59682 - RNA, 59 nt, Staphylococcus aureus subsp. aureus Mu50
ugucaucauuggaggaggcagugcagguucuguacuagguaaucgucugagugaagaua

SEQ ID NO: 59683 - RNA, 57 nt, Staphylococcus aureus subsp. aureus Mu50
uguauugucagaaggugucauuaaaguaauggcuaagaugggaauuucgacagugca

SEQ ID NO: 59684 - RNA, 118 nt, Staphylococcus aureus subsp. aureus Mu50
ugucgcaaacuuuucuuucaauaucguugauagugguauugaaucugcuguagcaaaagaaaucgauguuaaauugguagaugaugcuauuacgagaauuuuaaaagauaacgcgaca

SEQ ID NO: 59685 - RNA, 82 nt, Staphylococcus aureus subsp. aureus Mu50
uguauauugaaugucauguuaaauaaaguuauauuuuacuaaaugaaauauaaaauuguuugaggugauuucucgguguaua

SEQ ID NO: 59686 - RNA, 55 nt, Staphylococcus aureus subsp. aureus Mu50
uggggugggacgacgaaauaaauuuugcgaaaauaucauuucugucccacuccca

SEQ ID NO: 59687 - RNA, 76 nt, Staphylococcus aureus subsp. aureus Mu50
uucacucagguuuaacauuauuacaaaucccugaaggcguugacugggauggcgaaguaguuaaaguuguaguggg

SEQ ID NO: 59688 - RNA, 64 nt, Staphylococcus aureus subsp. aureus Mu50
uuaguauucauauaaauagucuuuaaauagaaauaggagggagacauuuaaugauaaauacuga

SEQ ID NO: 59689 - RNA, 73 nt, Staphylococcus aureus subsp. aureus Mu50
uuauuaauuaagaucaguugaguaguuguguuuauugauuuauaugaaacuacucauuugaagccguugauga

SEQ ID NO: 59690 - RNA, 105 nt, Staphylococcus aureus subsp. aureus Mu50
uuacguacgacacgaugaucuugaacuucuugugguugauguaagacauaauucuuugcaucuuuuaaucgaccuugagaaaaaagauauuggaauaguauuuga

SEQ ID NO: 59691 - RNA, 87 nt, Staphylococcus aureus subsp. aureus Mu50
uuaaaaaaccugaaacaaauuaguuugauaugcucucuucaaaguagauauugaauggaguauaucagcuuguuucagguuuuauga

SEQ ID NO: 59692 - RNA, 70 nt, Staphylococcus aureus subsp. aureus Mu50
uucauaaaggcacgcauacuuuguagucaguuaucuguucugacauauaaagcgugcgugcuuuuuugaa

SEQ ID NO: 59693 - RNA, 60 nt, Staphylococcus aureus subsp. aureus Mu50
guaguugacugaacgaaaaugcgcuuguaacaagcuuuuuucaauucuagucaaccuugc

SEQ ID NO: 59694 - RNA, 66 nt, Staphylococcus aureus subsp. aureus Mu50
gucaaaagaaaacagcaguaaaaucauuccuaauuuggaaucaucuuacugcuguuuguuguugau

SEQ ID NO: 59695 - RNA, 130 nt, Staphylococcus aureus subsp. aureus Mu50
guauuuaaggcgaauauuacggauagacgcaaauggagagacaaguuuagauugccauauuuacuugguaaggccgauuauauuuuuguugaugauuuccauccauuaauuuauacgguucgcuuuagac

SEQ ID NO: 59696 - RNA, 83 nt, Staphylococcus aureus subsp. aureus Mu50
guauuguaaucaucugccugugcauguggcaucucuuguguuaagcgaauuaaugacgaugccacuguauucugacucaauac

SEQ ID NO: 59697 - RNA, 80 nt, Staphylococcus aureus subsp. aureus Mu50
guagguacugcuucaauuuuaguagggacaacauugauuuuuggguuaaguggucaugaagcuaaagcggcagaacauac

SEQ ID NO: 59698 - RNA, 124 nt, Staphylococcus aureus subsp. aureus Mu50
ggugauuacauuacugggacuuuccaaguuaaagauuuaccgaaugcgaauccuaaaucaaaugucauuccaaaagguaaauauuuaguucuuggagauaaucgugaaguaaguaaagauagcc

SEQ ID NO: 59699 - RNA, 86 nt, Staphylococcus aureus subsp. aureus Mu50
gguucuguuuacaaucgugauaauguugaacucguuguuaugcaaacaacagcuggugagauaggugucaugaguggacauauucc

SEQ ID NO: 59700 - RNA, 55 nt, Staphylococcus aureus subsp. aureus Mu50
gugugggauugcauuguucacuauugauuuccuaggaacaaaaccaguugcacau

SEQ ID NO: 59701 - RNA, 93 nt, Staphylococcus aureus subsp. aureus Mu50
guucuuauuuauugauuucuuugauacagcugguacauuaguagcuguugcuacucaagcagguauuaugaaagauaauaaauuaccaagagc

SEQ ID NO: 59702 - RNA, 82 nt, Staphylococcus aureus subsp. aureus Mu50
gucuucgucuguguuguaaauguuuuaccuuucgcuuuaccugaagcugaaaugguaauaucuuuauuuuguggauauggac

SEQ ID NO: 59703 - RNA, 90 nt, Staphylococcus aureus subsp. aureus Mu50
gugauacaauuauuuuugcaucaccaguguauugguauagcauuucagcaccauugaaagcauuuaucgaacauuggucagaaacauuac

SEQ ID NO: 59704 - RNA, 70 nt, Staphylococcus aureus subsp. aureus Mu50
gugauggcgaacgcccugaagaacuaugugucuuuucgauauaguuuaaaucuucaagcuguuucaucuc

SEQ ID NO: 59705 - RNA, 73 nt, Staphylococcus aureus subsp. aureus Mu50
gggugaaguuuuagaaauugucaaugaugaagaagcaauuguucaaaugggaauuauuaaaaugaaguuaccu

SEQ ID NO: 59706 - RNA, 73 nt, Staphylococcus aureus subsp. aureus Mu50
gguaaaaccuguugauacaacuggggcaggggaugcuuuuauuggugcaguuauuagcaggauuuuagcaacc

SEQ ID NO: 59707 - RNA, 71 nt, Staphylococcus aureus subsp. aureus Mu50
ggucagcauuguaaugaucugaaauaaagacaacauugccaccuuguuucacauaguuaacaauugcugcc

SEQ ID NO: 59708 - RNA, 76 nt, Staphylococcus aureus subsp. aureus Mu50
ggcuguauucgaauaaauuuuucaucaacuaguauucggggggaauaaaguauauggaaauuuuacguauagagcc

SEQ ID NO: 59709 - RNA, 83 nt, Staphylococcus aureus subsp. aureus Mu50
gggagaaucuaaucaagauauuguugauauggcauuugcuuuaaaagaaauggaugccgacaguauuccgauuaauuuuuugc

SEQ ID NO: 59710 - RNA, 65 nt, Staphylococcus aureus subsp. aureus Mu50
ggcaguaguugacugaaugaaaaugcgcuuguaacaagcuuuuuucaauucuagucaaccuugcc

SEQ ID NO: 59711 - RNA, 72 nt, Staphylococcus aureus subsp. aureus Mu50
ggaugcauauauauauagauuaaaccgcacuucuauauuaauagaaagugcgguuauuuauacagugaaucu

SEQ ID NO: 59712 - RNA, 68 nt, Staphylococcus aureus subsp. aureus Mu50
ggauacagaaauguagcuaacauuuucccaauaaauguugaaagaaaugauauaguuacagcuguucc

SEQ ID NO: 59713 - RNA, 79 nt, Staphylococcus aureus subsp. aureus Mu50
uuuuccucuucaguagcaggcgguugcauugauucuuugauauaugcaauuuccgcuucgcuauccaaucuugggaaaa

SEQ ID NO: 59714 - RNA, 56 nt, Staphylococcus aureus subsp. aureus Mu50
uuuguacaaucauaaacugguguccuguuuuaagggcaucaguuuuuuuauacgag

SEQ ID NO: 59715 - RNA, 76 nt, Staphylococcus aureus subsp. aureus Mu50
uugucuugaugcaugcgcuaggcgucgauuuuucagaaauugaggcggaauuagcgcguagacaucauaagcgcaa

SEQ ID NO: 59716 - RNA, 80 nt, Staphylococcus aureus subsp. aureus Mu50
uuggucacuaaaucauaaguggauuguaauuauauuaaguacauuaauuuugguugcaacuauuguauuuggaggaccga

SEQ ID NO: 59717 - RNA, 84 nt, Staphylococcus aureus subsp. aureus Mu50
uugaucuuauuaaugauacauuagugucgauucguuuuagugugaaucaaaacguucauuuugaaguguuguuaguaaaauuag

SEQ ID NO: 59718 - RNA, 80 nt, Staphylococcus aureus subsp. aureus Mu50
uugcugaacaacuauacaauggacuuugguucucaccuuuaacugauagcuugaaauuauuuauugauaguacucagcaa

SEQ ID NO: 59719 - RNA, 77 nt, Staphylococcus aureus subsp. aureus Mu50
uuggaaugauucuaucuuuagcgauguguuuacgugaaagcuuaaaucaaccagaugcugcagaugaauuagaacaa

SEQ ID NO: 59720 - RNA, 67 nt, Streptococcus pneumoniae TIGR4
uuguuaaaccuuucgcuuuucaugguaggauggcucucugucauuuuacuugaaagugauuuggcag

SEQ ID NO: 59721 - RNA, 93 nt, Streptococcus pneumoniae TIGR4
gggacaggagacuugguuggagccuuaacagcuguuuuucucagccaaggaaagacugguuuugaagcuucuugcuuagcagucucuuaucuc

SEQ ID NO: 59722 - RNA, 71 nt, Streptococcus pneumoniae TIGR4
gggcaggcuuuggaggagcuguucuuccaguauggacgguauuuauugauuaguucguccagagacugccc

SEQ ID NO: 59723 - RNA, 95 nt, Streptococcus pneumoniae TIGR4
gggauaauauuugugcguccgauaaagguugccacaaacucauuagcugguuuaugauagaguucuuuuggucggccgauuuguuggaucacccc

SEQ ID NO: 59724 - RNA, 60 nt, Streptococcus pneumoniae TIGR4
ggcuaggcaacugugguacuuggauuaagacaccagcuggugcuaacguugucauggacc

SEQ ID NO: 59725 - RNA, 59 nt, Streptococcus pneumoniae TIGR4
ggguagcuauacaggcuugcgaauugcgguagcaacugcuaagaccuuagcucacaccc

SEQ ID NO: 59726 - RNA, 60 nt, Streptococcus pneumoniae TIGR4
guguuggguugauggcaguaaccaagaucaauuuaccgacuggauugcucucaacugcac

SEQ ID NO: 59727 - RNA, 61 nt, Streptococcus pneumoniae TIGR4
gugggcccauaaucauuucugugcuaccucuaagcuccucacagaagcgaccauggcucac

SEQ ID NO: 59728 - RNA, 61 nt, Streptococcus pneumoniae TIGR4
gugggcauaaugcgcgugaggaauuacagcgagcgguuaugcaugcggaaauuauggcuau

SEQ ID NO: 59729 - RNA, 80 nt, Streptococcus pneumoniae TIGR4
gguuagcccgaaagauguucaguauagauuaggccacucuaauuuaaugaucacugaaaauacuuacuggcauacuaacc

SEQ ID NO: 59730 - RNA, 66 nt, Streptococcus pneumoniae TIGR4
gguugggaugucuuacagccgguucaucuuuuguggaucaacuugguaacggauaccuucccagcu

SEQ ID NO: 59731 - RNA, 58 nt, Streptococcus pneumoniae TIGR4
gguuguuuccuuuacgcguagcaauaaaaugacggcuacagacuuaaaagaaacagcu

SEQ ID NO: 59732 - RNA, 72 nt, Streptococcus pneumoniae TIGR4
ggucgacaacauagcaggucuaugcccuugagauaagauguuauaggcgaaauaggcugcuguugucuuacc

SEQ ID NO: 59733 - RNA, 78 nt, Streptococcus pneumoniae TIGR4
gucgacgcugaggcugacgcacugguacuugcugaggcugacgcacugguacuugcugaagccgacgcacuugucgac

SEQ ID NO: 59734 - RNA, 62 nt, Streptococcus pneumoniae TIGR4
guacuaggaagcucguuuaagguugaguuucuugcaaaucuuguuagcguucuuccuuuugc

SEQ ID NO: 59735 - RNA, 96 nt, Streptococcus pneumoniae TIGR4
uguuuuaaacguucaauccguucugagauagguggguggguauaaaagaguuuuuggaaccccccaccuuucuuaggaucauugauauaaagggca

SEQ ID NO: 59736 - RNA, 96 nt, Streptococcus pneumoniae TIGR4
uuagggagcgagcugaaaaugcugcuuuggaagaaauugcaguggcucucaauauucgccaagauuacuaccaaguagaaaccaguauuguccuaa

SEQ ID NO: 59737 - RNA, 93 nt, Streptococcus pneumoniae TIGR4
ugggcuacuugcucuuaaguuaugcaguggaguucguccuuuauauuauauuuuagggaugaguaucuauucuauauuaggguugauaguuca

SEQ ID NO: 59738 - RNA, 56 nt, Streptococcus pneumoniae TIGR4
uguggcgacaaacugaugcgaagggauuccuucaagcguucugaauuugcgccaua

SEQ ID NO: 59739 - RNA, 78 nt, Streptococcus pneumoniae TIGR4
uggaggacugaaaugaaaaauauaaaugggaaaaagguaacuauuuaugauauugcacguuuaucagguuuuucucca

SEQ ID NO: 59740 - RNA, 104 nt, Streptococcus pneumoniae TIGR4
uggaagcagucuuugcuagaauggcucauagcuuugaugagguuguuaauaaaucaguaguggcggcccagggcggagucguaaaugguaaagaauuguuuuca

SEQ ID NO: 59741 - RNA, 57 nt, Streptococcus pneumoniae TIGR4
ugaaaaauaugaagaaagugcguucccaggacaugggagcgcacuucgucauacuca

SEQ ID NO: 59742 - RNA, 112 nt, Streptococcus pneumoniae TIGR4
ugaugcugaaccuguguuagguaauuguuugccagcaggugacugguagguaacaucuugcauuguuccugcaguugcuugcggugcacuuguugucuuaggagcagcauua

SEQ ID NO: 59743 - RNA, 80 nt, Streptococcus pneumoniae TIGR4
ugagaaauuuuucggacucauugaggacaaucugaagcagguucauccucuuuuucagacugucuuuaaaaccuuucuca

SEQ ID NO: 59744 - RNA, 111 nt, Streptococcus pneumoniae TIGR4
ucuacaagauuucccucaguagccacacuugcuucagcuggagcuggaacuucuucugcuacagucucugcuggagcagauguaggagcuacuggacucgguguugcuaga

SEQ ID NO: 59745 - RNA, 91 nt, Streptococcus pneumoniae TIGR4
uccaaaauauugguuaagcgaugcagcuccccccuguccuaaaagauaaggacgguaggaacgauuguauuucucagcuaauaccgcagga

SEQ ID NO: 59746 - RNA, 63 nt, Streptococcus pneumoniae TIGR4
ucauaaguaaggagagcauucagauugaaccauuaacuagaaaagguuuuccuuaugccuuga

SEQ ID NO: 59747 - RNA, 64 nt, Streptococcus pneumoniae TIGR4
ucagucuuuaaaaagccuauuguaucaagcuuucuagcuuggucaguagguuuuuuaauuauga

SEQ ID NO: 59748 - RNA, 97 nt, Streptococcus pneumoniae TIGR4
uccuaguuuacuuuuugauuuuuauugaguauaagaggucuuuccuaagcaguuagaggagaauuuugcuauacugauacuaguaagugguaaagga

SEQ ID NO: 59749 - RNA, 84 nt, Streptococcus pneumoniae TIGR4
guuuagucauuggauaugucagcaucucagcuaagaugaaaucaucucaggaagcugcagaguugaugcuuuuaaaugcugaac

SEQ ID NO: 59750 - RNA, 57 nt, Streptococcus pneumoniae TIGR4
ggaaauagcuucugccuuauccaccuuuugaaucaagaggggcagaaugauauuucc

SEQ ID NO: 59751 - RNA, 111 nt, Streptococcus pneumoniae TIGR4
gcuuuagaaaaaaguagauccagagauuuauuuaaaaagaauacuggugucgguccucaucgagaugacauuucuuuuuauauaaaugggauggaugcuaguuucggaagc

SEQ ID NO: 59752 - RNA, 68 nt, Streptococcus pneumoniae TIGR4
gauauaaguuuugcuacuguugauuugccugauccagaugaaccgacaagugcguaggacuuuccuuc

SEQ ID NO: 59753 - RNA, 68 nt, Streptococcus pneumoniae TIGR4
gauaagcuagaacaguaucgagaacuggauuuaucugugucuaguuuucgauuagauguucuuuuauc

SEQ ID NO: 59754 - RNA, 63 nt, Streptococcus pneumoniae TIGR4
gauggcgguuacuugucaucauguuggacccucuacaaggcucaacaacaauugacugcuauu

SEQ ID NO: 59755 - RNA, 55 nt, Streptococcus pneumoniae TIGR4
ccuuccaagugauccagcucaugcuggcaaaucugagcugggaagccugucaagg

SEQ ID NO: 59756 - RNA, 72 nt, Streptococcus pneumoniae TIGR4
ccuucagcgcucuuuacaucgguuuagguuuucuuggaaaucauuucccaguaccagcugaagcgaugaagg

SEQ ID NO: 59757 - RNA, 67 nt, Streptococcus pneumoniae TIGR4
cgagaugucauggagaagaugagccguucccaaguuucggcucuaccaacuuuuucugagcagauug

SEQ ID NO: 59758 - RNA, 69 nt, Streptococcus pneumoniae TIGR4
cugcugggaugguggauccggauaagggugagauuuucuaugcugggccgcaaaucccuaacuacgcag

SEQ ID NO: 59759 - RNA, 67 nt, Streptococcus pneumoniae TIGR4
gacuuaccucuugcucuagcagucggagauuuugauucugugacggaagaagagcgacaggugauuc

SEQ ID NO: 59760 - RNA, 66 nt, Streptococcus pneumoniae TIGR4
gaccagguagccguccauugaaaucauugagccacaugcuuaaagguaaacaaggacgcuuccguc

SEQ ID NO: 59761 - RNA, 92 nt, Streptococcus pneumoniae TIGR4
gacgaccaguaggggugguagcgaguccaccuucagcuguuucacgaaaggcaguuggcaugcuugcuccuacuugguacauggcaucgauc

SEQ ID NO: 59762 - RNA, 80 nt, Streptococcus pneumoniae TIGR4
cuugccuuccaugcccuacucagcguaagauuucuauacuaguauagacgucuuggcggaguuagauaauggaauccaag

SEQ ID NO: 59763 - RNA, 74 nt, Streptococcus pneumoniae TIGR4
gaaaccaauggcuugcguugaauugugauuguuuggaugccuguaucauauaaucguaccaauccauugucuuc

SEQ ID NO: 59764 - RNA, 55 nt, Streptococcus pneumoniae TIGR4
gaacucuauuuucagacuugagcaucugcagcugcauuuggaaauaaaagaguuc

SEQ ID NO: 59765 - RNA, 69 nt, Streptococcus pneumoniae TIGR4
aagcuaguuggaacuucugcaagcuccggcuuaaucccaucaucucuccgagcuaaguucagcaagcuu

SEQ ID NO: 59766 - RNA, 55 nt, Streptococcus pneumoniae TIGR4
aaauggcgguucaggagcguuugaaaauugaucaggcugcuuugacacggcauuu

SEQ ID NO: 59767 - RNA, 60 nt, Streptococcus pneumoniae TIGR4
acccucucuaaggcagucgauuggucggaucgaucaacagcuguguuguuuggagauggu

SEQ ID NO: 59768 - RNA, 55 nt, Streptococcus pneumoniae TIGR4
acaauaacccacaaugaggcuggcacaaucugcccagccucauauccguuauugu

SEQ ID NO: 59769 - RNA, 100 nt, Streptococcus pneumoniae TIGR4
acaggaggaauugaugaugucgaugcuccuuucauggaacaaaucaagcaccaggcagaaauugccauggaagaagcagauguuaucguuuuugucgugu

SEQ ID NO: 59770 - RNA, 66 nt, Streptococcus pneumoniae TIGR4
acagcugguuugaggccuugaagagcggcuuuuagguuggcuacaagcgugucaagcucagcuugu

SEQ ID NO: 59771 - RNA, 55 nt, Streptococcus pneumoniae TIGR4
agggcagcuucaccugucaaaaguuuugcaaauucuucugauacuggagcuccuu

SEQ ID NO: 59772 - RNA, 55 nt, Streptococcus pneumoniae TIGR4
agaagccuuuaaucuccuuuauaaacaagguaaaguucgagauuuuggaguuucu

SEQ ID NO: 59773 - RNA, 68 nt, Streptococcus pneumoniae TIGR4
auuuuaggucacuugauagcuauauuuauuucaucagauuuaaacgcuuuagcuaugggugaugaaau

SEQ ID NO: 59774 - RNA, 83 nt, Streptococcus pneumoniae TIGR4
auuucuuuuuccuaggugauuuuaaugagguugaaauucaaaauguauuagaaucauuuggcuuuaaaggucgaaaaggagau

SEQ ID NO: 59775 - RNA, 104 nt, Streptococcus pneumoniae TIGR4
caagucuauugacuaaggaagcuucaggugaggacuuggcuuauaguguaaccaugaugcauggccaagaccacuuaaugacaacuaucuuguuaaaagauuug

SEQ ID NO: 59776 - RNA, 65 nt, Streptococcus pneumoniae TIGR4
cacuauauuucucaggauaagccuuggaaucaauuuucuguuggacgucuaagagaaguuuggug

SEQ ID NO: 59777 - RNA, 108 nt, Streptococcus pneumoniae TIGR4
aucauuguucuugcgaaugacaguugaaguugaaauagacaacugaugaucaaugucggucauagaagucuuuuuaauuagcuucugagcaaucuuuugguugaugau

SEQ ID NO: 59778 - RNA, 89 nt, Streptococcus pneumoniae TIGR4
cagguugcucaaagcacugcuuugagguuguagauaagacugacgaagucagucacauauauaauccaaggcgacguugacgcaguuug

SEQ ID NO: 59779 - RNA, 89 nt, Streptococcus pneumoniae TIGR4
cagguugcucaaaguacugcuuugagguuguagauagaacugacgaagucagucacauauauaauccaaggugacguugacgcgguuug

SEQ ID NO: 59780 - RNA, 56 nt, Streptococcus pneumoniae TIGR4
caucaucuuggcaguuuucaaagaaguauucuuggaaguauuugccagagauggug

SEQ ID NO: 59781 - RNA, 56 nt, Streptococcus pneumoniae TIGR4
cagcuggauagagcauucgccuucuaagcgaacggucgcagguucgaauccugcug

SEQ ID NO: 59782 - RNA, 58 nt, Streptococcus pneumoniae TIGR4
aaaaaaacuccguagucucuagcgcuauaaauccggcuagagauuacagaguuauuuu

SEQ ID NO: 59783 - RNA, 93 nt, Streptococcus pyogenes M1 GAS
auuguuccaaaguucugcaaaaugcgcagcagccauauccgcuucugauugacuagcuggguaggcuggcgucagauugagaaugguuccaau

SEQ ID NO: 59784 - RNA, 55 nt, Streptococcus pyogenes M1 GAS
aguuuagcuaguuuuucucaauacggcaugaccuugagacagaucuggcuugacu

SEQ ID NO: 59785 - RNA, 88 nt, Streptococcus pyogenes M1 GAS
gaagguaucuuugcugaauuagguggcugggaggcagaaagugaagcuucucaacuucuccaaaaucuaaauauuccagaagaccuuc

SEQ ID NO: 59786 - RNA, 57 nt, Streptococcus pyogenes M1 GAS
gcacaaaaccgacucuuguaguuugcuuuuuggcaacaaacaguagucgguuagugc

SEQ ID NO: 59787 - RNA, 58 nt, Streptococcus pyogenes M1 GAS
gagucagaagcauuuguucaauuggcagaaaugccuguggcagaaaccuucucggcuc

SEQ ID NO: 59788 - RNA, 61 nt, Streptococcus pyogenes M1 GAS
gcuaucuuuuggaaagccugccgugucuaaaaugccaaaguaggcauuuuuaggagaaggc

SEQ ID NO: 59789 - RNA, 87 nt, Streptococcus pyogenes M1 GAS
gcuauuuuuagcacucaggcaucuuacauuuugccuuauaccaagggcagccaauuucauguagauaaugccuacgcucaaaauggu

SEQ ID NO: 59790 - RNA, 68 nt, Streptococcus pyogenes M1 GAS
uaauccagcuuugcuuuaugguuuugaugcggguuauuuggcagaaaaugguccagcagauuugguua

SEQ ID NO: 59791 - RNA, 75 nt, Streptococcus pyogenes M1 GAS
ucaagguaucuucuagcaaauccucguccucaauguauuucuugagagagcuuguugagcuggauaauuucuuga

SEQ ID NO: 59792 - RNA, 64 nt, Streptococcus pyogenes M1 GAS
ugcuacuugcuuguugauuaacugaacagcuuuaccgacuucuuugauugaugaugcaaguaca

SEQ ID NO: 59793 - RNA, 65 nt, Streptococcus pyogenes M1 GAS
ugcaguaucaucacgcucugaaaaaguuggagaguauaucucagaagcuauggagcgugugggca

SEQ ID NO: 59794 - RNA, 63 nt, Streptococcus pyogenes M1 GAS
ugugccugugugauuuugcaagcuaauggcuccuauggcuugcaccguaucauauugguagca

SEQ ID NO: 59795 - RNA, 70 nt, Streptococcus pyogenes M1 GAS
uucaaaaauugcuaauaaucguccaaaaagauaggaacgauuuugauugguaugaucuagcaucggugaa

SEQ ID NO: 59796 - RNA, 78 nt, Streptococcus pyogenes M1 GAS
uugaacaagugucaacuaaaacagcuuauccugcaccagggaucgggaaaaauauuguauugguugauuuugguuuaa

SEQ ID NO: 59797 - RNA, 63 nt, Streptococcus pyogenes M1 GAS
gguuuugggaagggauuugcuagccuucauaaggcucaaaaaaugaccuucuucuuuuaaauc

SEQ ID NO: 59798 - RNA, 58 nt, Streptococcus pyogenes M1 GAS
ggagccacugaccuuugaccacuuagaagaaauuucugggaaagguuuucagggcuuc

SEQ ID NO: 59799 - RNA, 55 nt, Streptococcus pyogenes M1 GAS
ggagcugggcuagcugguucugaagcugccuaucagauugcuaagcgcgguaucc

SEQ ID NO: 59800 - RNA, 56 nt, Streptococcus pyogenes M1 GAS
uuggagugauugcacugcuguuugcauuaacauuuggaacagucaagucgguccaa

SEQ ID NO: 59801 - RNA, 90 nt, Streptococcus pyogenes M1 GAS
uuuuuuugacagguuuugugcacuguaaaauaggcaagguacucguugccuagucugucauuauggguuuguagggcauugucaaaaaaa

SEQ ID NO: 59802 - RNA, 59 nt, Treponema pallidum subsp. pallidum str. Nichols
uugagggucguuugacgcaacuugcucuagagagugagucugcgcgaaaggaucuugag

SEQ ID NO: 59803 - RNA, 67 nt, Treponema pallidum subsp. pallidum str. Nichols
ugcagcuguauccgaaauaccauuuuucuuucgaaagcuuaggagugcuauuuugggagcagcagcg

SEQ ID NO: 59804 - RNA, 73 nt, Treponema pallidum subsp. pallidum str. Nichols
ucuucuuguucgauugcaaacucaugcucggcaaggucaagcugcuggugagaguuuucaagcgaaaagagga

SEQ ID NO: 59805 - RNA, 97 nt, Treponema pallidum subsp. pallidum str. Nichols
ucgauaccagagaagcgugcaucgauugcguacaaaucuaggagcaaacuguaggccuuuuuugauucgguuuuguacguuccucugaugguaucga

SEQ ID NO: 59806 - RNA, 78 nt, Treponema pallidum subsp. pallidum str. Nichols
gcgcaagcauugcagugccagacugggugagcaccugauucuuaguguauucaaccauuugcuuugcgauguuugcgu

SEQ ID NO: 59807 - RNA, 86 nt, Treponema pallidum subsp. pallidum str. Nichols
gcguguauuauuuuaaugcagcgucuugcgcggaugagcguggucgcuucgaggaggcgcgugagcuguaucagaggagugcacgc

SEQ ID NO: 59808 - RNA, 57 nt, Treponema pallidum subsp. pallidum str. Nichols
gcgugaugcacgugauuuugugcugugguuuacccguaguaaauuugugcgucaugc

SEQ ID NO: 59809 - RNA, 62 nt, Treponema pallidum subsp. pallidum str. Nichols
gagucauuggagcgaacggggcagguaagucaacuuuuuuaaaaguccuuuccggugaacuc

SEQ ID NO: 59810 - RNA, 59 nt, Treponema pallidum subsp. pallidum str. Nichols
gaggaugaagcguaagguucauauuaggaagaggguguauggcacggcgguucgcccuc

SEQ ID NO: 59811 - RNA, 77 nt, Treponema pallidum subsp. pallidum str. Nichols
gaugucauguauguuuuaguucuguggagcgacaugcgcauagauccgcagguaugagccagcacauacaggauauc

SEQ ID NO: 59812 - RNA, 100 nt, Treponema pallidum subsp. pallidum str. Nichols
gccugagacgcccgacauagagcuucucgggcgguucguucguuccguucaacgguaccuauacgaagacgccucacggaagcucauugucguuucaggc

SEQ ID NO: 59813 - RNA, 69 nt, Treponema pallidum subsp. pallidum str. Nichols
gagaaguggcaguuuggauuugaaccacacgggaagguugugugguaccgacaccggagugccaugcuu

SEQ ID NO: 59814 - RNA, 77 nt, Treponema pallidum subsp. pallidum str. Nichols
cuagacuacggagauacaguuuuuacgucgguuuuugcacagaauacaagaacuaggagucugugucgcccguguag

SEQ ID NO: 59815 - RNA, 64 nt, Treponema pallidum subsp. pallidum str. Nichols
ccggugaugugaccgucucuacggugaaucuacccagugaagaaaugaaaggacgcaucauugg

SEQ ID NO: 59816 - RNA, 63 nt, Treponema pallidum subsp. pallidum str. Nichols
cgcugugguuccaucggacccuucugccaaggcagagggcacgcgugccguugggacaucgug

SEQ ID NO: 59817 - RNA, 66 nt, Treponema pallidum subsp. pallidum str. Nichols
cgcaaugccugccgcuccaagauaauacggcaccgaauauuccauuuuuggaucguaggcuaugcg

SEQ ID NO: 59818 - RNA, 78 nt, Treponema pallidum subsp. pallidum str. Nichols
auacugcucuggaaaagauucgcuucaaugaggagcucgugacucagucugaggcggccuucuuuucaaagguagugu

SEQ ID NO: 59819 - RNA, 59 nt, Treponema pallidum subsp. pallidum str. Nichols
aacaagcaaucguuacucuuuuaaaaacgcugaaagggcgugggaaaacguugcuuguu

SEQ ID NO: 59820 - RNA, 129 nt, Treponema pallidum subsp. pallidum str. Nichols
cagaauagacuugaccacacgguugccgguaucaaugucgcggcagagaacuugcaggcagcugagucucgcauccgcgacguggauauggcaaaagagaugguagacuacaccaagaaccagauucug

SEQ ID NO: 59821 - RNA, 65 nt, Treponema pallidum subsp. pallidum str. Nichols
caccguugguggggcuggacguggcguuccgugcggaaaauggcuuccugcuccaacugacggug

SEQ ID NO: 59822 - RNA, 82 nt, Treponema pallidum subsp. pallidum str. Nichols
auguaaugaaaauccuugccugaaagcugcacauacccgccggaauccgguucugcgguuaucagcaauuguuucauaauau

SEQ ID NO: 59823 - RNA, 61 nt, Treponema pallidum subsp. pallidum str. Nichols
cauaaucagcgcuaaaggaaaugccgcaaugauggcuaaacuuuucaggugcaugagugug

SEQ ID NO: 59824 - RNA, 61 nt, Treponema pallidum subsp. pallidum str. Nichols
cccccauggagacugcaccugagccgcgaggauuacguguugccauaguacucucaggggg
